United States Patent Application Publication US 2026/0058010 A1 - sequence listing, part 7

SEQ ID NO: 70 - DNA, 144270 bp, Homo sapiens
  source 1..144270: mol_type = genomic DNA
gctcagagctctggttccggatccatcagccctgccttctggaggctgctgccccttctttgcactttgcgggtctccctctgctgtttgtttaaggtgcctcacagcataggggccactgagcaccctgactgctgggctgaacacggacccttcccagcagcttctctgcaaagctgtgctgccagcagccggatcgcaggcaccgcctggcagatctgaaggttcgtgctgtgcaacgtgccttcctgtttgtgagttcacctgaccgacaccaggaggggctggactcctcgcctgccgccggcaaggcccgccctgggccagtggggtgcacacagcaggccctgtgtcgtgggtggtcagaattttggccacaacagttgggggacggggctggatgctggccaaggaagagcaaacagcctcatctccttcccacagcttggtgggtgcagagaggacctggggacacggtccttagggtctcctccggccccgagtctcgatgtccacatagagatggcctgagtggtcagccagacctgcccagaccacatcttagcccagccctgggtgtcttcagggagctaaggaggaagtcacagtagacgtccgtgggtcacagtgaggccagtcaccgctctgaggtgcaggccccgagggccacggctgaggaggcccagccaggccagcagtggccacgggaagccccaggccctccccacaacaacagcccggagcctgtgactctgctctcacagggtgaggccggccgtgctcccgcctcccggcttgcatgcagctctgtgcgttggtggcagccaaggcaggcagcctgacctcagcctcaggagctctgttggggggcggggcacccaagggggcactcagggcctgagccagcgtcccaaggctgccaggtggcggctgcagctacttttctgctccaccgtcagttgggggagcactgagacggcagcacaaacccccaacctgggctgggcaggaggcggccccggggcagcagcacctgggtgtctgctctgtggaggcccagaccggagccactggcctcagccctccccggggcccatcctggaacagacttggcctcacagtggggcacggacctcctcgccatggccacccggccctccccggcagctgcccagagctctgcggtcaccacggccttcccggtgccccgcggcacctcacatcacttgggggcagggaccacgtgctgctgggaacaggaagtgtgtggcttgattctgtgcggcctaagtgtgtttcctggcagggtcagtcactgccagcgctgggaaacggccggcctgaacgcaagcgatcagccagcacccactgccaggaacgccacacacagagcgcccccaatgccatcctggggtggccaccaagggcggggtctcagcctggcgtgcgctggcatgggggacacgaattccgcagtccacaggcaggggacgcaccgcacagagcaggacccacggctgctgctgggtcgggttttatttcaaatgcagccacagaggcggtttctgcacaggtacgtgatccgactccacaagctcccaccaggggctccccatgacccgcaatgacgctgtgtggggtcaaaggaaaacaggccacagccaggcccctcgatggacgcaggcaggggaccaggaatgcggcccacgcagggggatcgggaatcaggcggaaggtgcaggtttgcagctggcgggaggagccagcatgccccaatctctaaaatattcccggtagaaaaatagacatttccctccaaagcagattcctggggctggagggtccctccaaggccaggggtccgggtgattccagagcatccacgctctgcgctgaaggcactgaacctgccatcactgtcacagccgtcaccggccaaggagggtctggaggagggaaggggcccttgcgaggctctggtgctggtgatcccggcccccaccaccggaggagctgaaagcccttgctcagccgctgccctgctggtgaacccggcccccaccgccggaggagctgcaccctgtgtggtctgaggcagccctgcactgggcagcggccccgccccgcgctgaacccactaggagagcagctgcagcacctgtcggatgcgctgggccctccccggcagggggggatcagagccctcctcatccagctcccgcatcagggcttccgccttctgcaccgtcagctctcgggcccggccctgcagcccctccaggtaggccagcagggtggagaagtgctcatcgggaacctggacgggaaagagatcgagttggtcaggggcggggcagggaggggccgctgaacagcaggagacaagacgctgcagccaaggacacccgggcctcaggcttccgtcctcccactgcggcccgagggtgtgggcggcctggccacagaccctgccccagacactggaagaagaaatgcctgtttagaggcagacaaaacactcaattaacctgggtaaaacagaagccatgtggggagaacatttcacaaacatcgtaaaaatcctcagaaaaacgagaaaatacgacacaaattaaacaggggtaggcggtgatgaaaggtgcattcagaacaaaaagccaagtacgcgccggcacttggcacgctcgcctttctgctcagggcggcagtggccaggtggcatctcttggtggcctgacccttgtctgctggtggtgggggcacctctgcacaggctcaccagtcacctgacaatctgctctgcaggcacgtttcctcaggtccctgtggcagcggctttcaacactgggctctttttattattgagttagcagagttctaattccatgtgggacttgcaaacgtctcccattctgtagcaaccatttcactttccagctagttctgtatgcagtgcaaagtcttagattctttttttttttttttttttttttgagccggtcttgctctgttgtccaggctgcagtgcagtggcacgatctccacctcccaggttcaagtaattctcctgcctcagcctcccaagtagctgggattataggcaagcattaccacacctagctaatttttgtatttttagtagagacggggtttttgccatgttggccaggctggtctcgaactcttgacctcaagtgatccacccgcctcagactcccaaagtgctgggattacaggcgtgagccaccacgcccggctacacagtcttagatcctgatgaaggcactttctcgactttttcctttgtcgcttgtgcttctagagtcacatttaagaaactgttgcctcacccaagggcacgaaatggactcttaggctttcatctaagagttttggttttagcttttaaatttaagtctctgatccattttgagttaatttttgcatatggtttgaagctgggggctgcgtgcattaagtatcggcatgttcgtaaatatgtacggttacatatgaaataaaaatgtataagtaaaatgcacatttgtgtgtttgtaaatatgtttaattacaatagtgtaagataactttgcgtgtgtgtgtgtgtgtatacacacatataaatggctaaccaaggatttgcctaaccaaggattatttttctgtataaaaagttttgtataaagtttacttttggtaatagtaacatataaataaaaccacgtaaactttggttaaaacaaaacaaaacgtggaaacccagttgtccctggctctgttaagaagaggtttcctccacatggaacaggcttggcccgcatgctggaatcagctgcgccgggcgtgagggtttccaggcttcccaggctgttccagtcaattctacttccacccttgtgcctgccccagtgtcgcgattaccggagcttgcaatagggcttacaatcggcttgcaatagggcttgcaatgtgtatgtcctctaactctgaggagggagagtggcttgagcccaggaggtcgaggctgcagtgaactgtggtcgtgtcactgcactccagcctgggcggggccctgtctcaaaaaacgcccacaaaaaaacaaaaacaacaaaataatgaaagcaagtggctgcaggctatgcctggaatgtcccagggctgtgagtggggctggtgggcctgccccgctctgagagtctgcaaacacaggcacggcaggagaaaaccgccccctgcccccagcgcgcacgcaaagcctggcctctagtaacgtgggcgcaggagagccagcgaggcaggaggcactgcccaccggatgcagctcagcagaaccgtgggctcctccagcctcacaggacatgggcagctccagcccgccgcccagcagccgggtttagttcagaattctgtctcgtttcatcctgtgaaactctatctcacatcctgcccctgaaaagggcagctgcccacacgtacatgtgtagacacacatcacgcgcacacacgtgtagacacacgtcatgcacacacgcacgtgtagacacacgtcacacgcacacgtgcaggtggcctccctaaggttaccccgtgttggtttctgccctgaaggccggcggcagggctcctggaggaggcaacgctgctcatctcttagaacaaaggcaccgggagacctgccctgcagtggggccctgagggcggccccttcagactgtggcttctgctgtcagggccccagtgtgcacaggagacgtgcctgccccgccgtgcacagacctcagcccccaggagacgtgcctgccccgccgtgcacagacctcagcccccgggagacgtgcctgccccgccgtgcacacacctcagcccccgggagacgtgcctgccccgccgtgcacacacctcagcccccggggggacgtgcctgccccgccgtgcacagacctcagcccccaggagacgtgcctgccccgccgtgcacacaccttgtcactgtcatacatgtgcagcaggagccacgtctgcctcgtcttctgaaacctccagttcttgtgcttttgggcccatctagggaaagaaagacaaacatctcagggtgctgggcaaaagactcccgggcagctgtctgccctgagagatcggggacgcctcatcttaggagagggagccccaccaggtactacacaccaaggcctcatgtgaagagggtttttggagcccctcccctgcccgaggcgaggagccgcaaccccacgccctgctgccgcctgaccaggaagcatgtggacgccactcttaccttggccaccccggggctcaccactgaccccaagtccccgtgggctcccccaccccatgggtcacacggattttacagggggggaaggatgaagtgagtttctctgggaggaaagggagcgatgtaattgatgatgtattttctacatgaaaatgggaagactgtaaggaacaataccctgagtcccaggccctcacaacaaggggccagtgggcctggggacgagcagctcccggctgctagaggggccgctccccagggccacaaccaccccgcccccgtcccgctcctgcactagggcctgtggacatcaggcagctgcggatggagcgaagctggcgctgtgggtagggcagggccaggcagggtttactccagagacctcctcccagatacgtgtttccagggccaggcagggcagccgagcccagaagcctccatcagtgtgcaagcccaggtctgaagactgtaggctcagcacgggggagggccctgtgcctgttgtgagcgctgcccagcttgcctgaccccactgccatgtgggtgagtggagtcctgtgggtgtggagccctgtgggtggggagtcctgtgggtgagtggagtcctgtgggtggggagtcctgtgggtgagtggagtcctgtgggtggggattcctgtgggtgagtggagtcctgtgggtggggagtcctgtgggtgagtggagtcctgcgggtgagtggagtcctgtgggtgagtggaatcctgtgggtggggagtcctgtgggtgagtggagccctgtgggtggggagtcctgtgggtgagtggagtcctgcgggtggggggtcctgccggtggggagtcctgcgggtggggagtcctgtgggtgagtggagtcctgtgggtgagtggagtcctgcgggtggggagtcctgcgggtggggagtcctgtgggttagtggagtcctgtgggtggggagtcctgtgggtgagtggagtcctgcgggtgagtggagtcctgtgggtggggagtcctgtgggtagggagtcctgtgggtgtggagccctgtgggtggggagtcctgtgggtgagtggagtcctgtgggtggggagtcctgtgggtgagtggagtcctgtgggtggggagtcctgcgggtggggagtcctgcgggtggggagtcctgtgggtgagtggagtcctgtgggtgagtggagtcctgtgggtggggagtcctgtgggtgagtggagtcctgtgggtggggagtcctgtgggttagtggagtcctgcgggtggggagtcctgtgggtggggagtcctctgggtgagtggagtcctgtgggtgggaagtcctgtgggtgagtggagccctgtgggtgagtggagtcctgtgggtgagtggagtcctgcaggtggggagtcctgtgggtggggagtcctgtgggtgagtggagtcctgcgggtgagtggagtcctgcgggtgagtggagtcctgtgggtgagtggagccctgtgggtgagtggaatcctgtgggtggggagtcctgtgggtagggaatcctgtgggtgtggagccctgtgggtggggagtcctgtgggtgaatggagtcctgtgggtggggagtcctgtgggtgagtggagtcctgccggtggggagtcctgtgggtggggagtcctgtgggtgagtggagtcctgtgggtgagtggagtcctgtgggtggggagtcctgtgggtgagtggagtcctgtgggtggggagtcctgtgggtgagtggagccctgtgggtgagtggagtcctgcgggtgagtggagccctgcgggtgagtggagccctgtgggtgagtggagtcctgcgggtggggagtcctgtgggtggggagtcctgcgggtgagtggagtcctgcgggtgagtggagtcctgcgggtgagtggagccctgtgggtgagtggagccctgtgggtgagtggaatcctgtgggtggggagtcctgtgggtggggagtccttgggtgagtggagtcctgtgggtgagtggagtcctgtgggtggggagtcctgtgggtgagtggagtcctgcgggtggggagtcctgtgggtgagtggagtcctgtgggtggggagtccttgggtgagtggagtcctgtgggtttggagtcctgtgggtagggagtcctgtgggtgagtggagtcctgtgggtgagtggagtcctgtgggtgagtggagtcctgtgggtggggagtcctgtgggtgagtggagtcctgcgggtggggagtcctgtgggtgagtggagtcctgcgggtggggagtcctgtgggtgagtggagtcctgtgggtgagtggagtcctgtgggtggggagtcctgtgggtgagtggagtcctgtgggtggggagtcctgtgggtgagtggagtcctgcgggtggggagtcctgtgggtgagtggagtcctgtgggtgagtggagtcctgtgggtggggagtcctgtgggtgagtggagtcctgcgggtgagtggagtcctgcgggtgagtggagtcctgtgggtgagtggagtcctgtgggtgagtggagtcctgtgggtggggagtcctgtgggtggggagtcctgtgggtgagtggagtcctgtgggtgagtggagtcctgtgggtggggagtcctgtgggtgagtggagtcctgcgggtggggagtcctgcgggtgagtggagtcctgtgggtgagtggagtcctgtgggtggggagtcctgtgggtggggagtccttgggtgagtggagtcctgtgggtgagtggagtcctgtgggtggggagtcctgtgggtggggagtcctgtgggtgagtggagtcctgcgggtggggagtcctgtgggtgagtggagtcctgcgggtggggagtcctgtgggtgagtagagtcctgtgggtggggagtcctgtgggtgagtggagtcctgcgggtggggagtcctgtgggtgagtggagtcctgtgggtgagtggagtcctgtgggtggggagtccttgggtgagtggagtcctgtgggtttggagtcctgtgggtggggagtcctgtgggtgagtggagtcctgtgggtgagtggagtcctgtgggtttggagtcctgtgggtggggagtcctgtgggtgagtggagtcctgtgggtgagtggagtcctgtgggtggggagtcctgtgggtgagtggagtcctgtgggtgagtggagtcctgtgggtggggagtcctgtgggtgagtggagtcctgcgggtggggagtcctgcgggtgtggagcccagctgtgcagctgctaggtgacacgccagccccatgtgcagtgacgcagggctcctgcgtgatgagaggggcctccagggaggtttaattttagttcctttctttttagacagcccctcgtcgtctgctccccggatggccgacccggccagcgtgggcccctgtgaggtgcacccgggccagccaggccatggcatctgcctgctgggggctgttttactgctgcagggcagaagttggcatctcagctctgccactttctaactctcccaccttgagctgctgctttccaccagcctgtttcctccttgggaacgtggagtggtgaccccacttcacgggtgttcccagagcccacgcacggtgagtcagtcacagctgctctgcacactgccctcccatggggcccgaggccacagcactgctggcccacggcactgctgcctacggccctgaaccaagggcgcctctctctcaccgagcccccaccaggcagacttcaagccaagcccatctccctcaccaccgaagatgagccgtcccgctcttggcctcgtcactgggggagcagacacagcgaggggcgggtggggtgctcagtgtcgcctgtggctcccacggcactgggcgaggcctcctgagtgatggccgcctctgccacccaccctggggactggtccctgcgcaactgcagacagttcacaggatgcctgacacaatcctctttctctctgcctaggtggggcagcagacaggagatcccatcttggaaaaggaaagagagcagtcagagggaagtcccttgtccccagcatagcgggggccacggccactgcagggtcatctgtccagagctgcctagagcgtcccagagagaagaacctcctcccctgtggtactcaccagctgggtggagaaccagagtccctgctagcctactgggctttaaaaaaaagcaggggcggctgggaacagtggctcatgcctgtaagctgagcactttgggaggccgagggcggatcacaaggtcaggagactaagaccatcttggttaatacggtgaaaccctgtctctactaaaaatacaaaaaattagccgggcgtggtgtcggatgcctgtaatctcagctactcaggaggctgaggcaggagaatcgcttgaacctgggaagcagaggttgcagtgagccgagattgcaccactgcactccagcctggcgacagagtgagactccatctcaaaacaaacaaatcaacccacaaaaagcggggacttcttgctgaacccccttccaaaagaaaactgagcgagggtctctattgagacagcatctgaagccggcccgcagccacagcgtccacgtgctcgtaactgcaccaggaactgccagccgcggtgagctgacgacccaatgcccatgaaggcccgagcggggctggcgcggacaggggccgggtctcatgggttggccgctcctcccatacttggagctgggctgtccctcggcagcggggcagtgggcctgggtagggaaggacacccaagaagtgtcccctaagctccgctgatgggacagtttggcctctgctctggcctgtcattccagggttccaggcccggaggccacggggtgcaaggaagctaagacaccatgctgtgctgggcaacatggggacctgaggagggtgggcttgggctgccccacggcaggagtgacttgctctcgtcctcccgcaggtgagtgggggaccccgtcccggctggatccgtgtggcccgggtcccagttcctctctctcctgtgggggcaccacctcccgcctcgagcagacccaggcagggggccggcccccgaaaatggtgagctaaagcctgcagggaccagggaggcagcggtcacctcgccacctgcccccaacgtgaacacccagcaggcgtgttcttttcttttttcagttatatggaaagtaaatcttcaatttcctgcgttaagcatataaataaactcttttttctctttaatgaggaacaggcttgcccgctgacagccgtgtgcctcgctcgtgtaactaccacagtggacccagcaacccagagacccacagaaagtggagggactgcttccagcactcccaaacttccgcctatgcaaggccagagcaacacggctctgagctggaaaaacagagctgggtgaccaagcctggggcccctgctgggaaaacgaggggacagtcacagcacagggaaagagcacacgacggccacagtgcagggaaagagcacacgacggtcacagcacagggaaagagcgcacgacagccacagcgcagggaaagagcgcacgacggccatactgcagggaaagagcgcacgacggccacagcgcagggaaagagcacacgacggccacagcgcagggaaagagcacacgacggccacagcgcagggaaagagcgcacgacggccatactgcagggaaagagcacacgacggccacagcgcagggaaagagcgcacgacggccacagcgcagggaaagagcgcacgacggccacagcgcggggaaagagcgcacgacggccacagcgcggggaaagagcgcacgacggccacagcgcggggaaagagcgcacgacggtcatactgcagggaaagagcgcatgacggtcacagcgcagacaaagagcgcacgatggccacattgcagggaaagagcacacgacggccacagcgcagggaaagagcgcatgacggccacaatcccccatcccaccctctggaccctcctctccccagccctgctgcacagctcccaccagccccagcttcacacaaagccaggagcaccccaggaaggctgcagagaagatgaacccttgagatgcaagaacagcccagggtatggtcacaggtcacaggccaaggtcaccgtgtggggatgctgcccagcctgcgacccgggttctagggacggggcatgaagaccccacgggcgctgggtcgacgtgtcttgggggcagagccttcgggggatctggaggggagacccccagggcatcctggaatgggtggggtgcctcccagagagatgagaggaaactctccaccatgagggctcaccagaacaatccggggtctcctccacacacagcccacctggctgcagatggctttgcctccaggaggaacccctcgtggaaagcccataagatggccatgggccacggcggccagcatgtccttcctgagtcccagtccagggcctctgcagggggaggacaactcgggcacctaccttcaccgctgcccctgggctgggggctctgtggtgggccagccgtggcgtggccagtggtccccagcagcccccaggctgaggacactcccctgtgggaatccccgggctccctctctttggaaaaccctgagttgccagggataccgtgggctccacacatccacgtgggctctgatctggcagccagatgcggctgggcttgcgggcacccttggagacccccaggaaagaggagaagctcctgccggggtgcccgtgtctgtggctggcctcctggtgtgtggatcccaggccttggaagaagctcctgtgggaaggggctgctttgtttctgagaagtaagagtcccccctcctcccacacgcaggacacagtgcctccgcacaggacttgccgctggggggttgcgagtagcatgagggggccacgggaaggtcccagagggggagaggagggtgaggctgaggacaggagcagggcatgctcccaggcactcaggaccttcccgtggggtgctcggagggtgtgtgatcatgggaggggagtcagggcgcctccagggtgaagaccagggagtggcagccacgtggtggagcggatggtcccccctctcctgcccacgtccccaacgtcccccttgtctaacagtccacactgagagcagcggaaggtgctggcaggcctggggaggaaggcggacaaaccccgcccaccccaggcatcagggcaggtccagaacagccacgccccgaggcacctgccagtggagacaggcaaggtgcaggtggcacagctgcaggccccagtcgccctctgcctcccacagggagcctacagtccattcctgcggctggcaccttccaggcctgtgtccacctgctctgcccagcccacaccttgcccacacctgggctcgagacgctgcactaacggcctctgaagccctctctgtctacagcgactgaccctgcggtggcttgtggccctgcctgcagagaagcaggagcaagcgcaggaggcagcagcctcacaccacagccagcaccttgggtcccctgggccaagcgcgttcttggagcaagaaagagctcttggggtagccctgggcacctggcctcagccccacgttcctcagggagagggaagctaagcctcccagagaactgaccagtgcagagacccatgatgactcaactggttccagccggatccacccaacgctatggctgagctcattctatgacccccaaggcagcctcagctccgagaaacaggaggcttgcccccatccccatttcctgagcccggcgctgagcctggtgcagggcagccaagagcccctctcctgtaggtggaggaccgtcctggggatgcacacacaacacacatgtccacacataaacacacacgtgcataaacacacacgcacacacgcacatgtacacacgtgtatacatgtacacacgcacatatacacaacgtgtatacacacgcacacacgtaaacacacgcacacacgtgtacgcaacactcgtatacacatgcacacacgtacacaacacacgtatacacatgcgcatacatgcacacgcacaccccctcatgcgaacacacatgcgtgcacacacacccatgcgaacacacatacacgcacacacacacacatacacatgcacacacgtacacacatgcacacacgtacacgtgcacgtgcacgcagcgtgcacatccacgcaggccccgctgctcattccgctagctgcacagccacactgggggtcatctctccgaggaggtcatctctccgagggcctcccacagaggtgcggctggagcctgtcctcccaggcagggccagtgcccccacaggacaccctgcccctcagggtgacttcatcacagggacccagttcttgtctctgaggaagccagccacgtggacgccgtgacaccccttattctaggtgcagtcagcactcagggagacggacaggaacgggcagcagcctgtgctggtaagcgccggggaggtggccacagcccgcaaggctgtggagcccacgccaaagcctctgacccctgcaatcctgcaccgtccacccagccacgccgcaggcaccatccacccagccacgccgcaggcagccagggagatggcaccctgtgcccagcaccccacaatccccgtcttcccgctcttgggtggcagtggcgcctcctgtcactgtgagtgagggctgaaggccaccacgagttccctcctcctcacccccacgtccaagcagcacccaggcccgtggattcttcctgtggtgacgtacacctggggcaaggttcaccatcagacccatttctaaaagcacagttccaggcaacccctgcacgggcagcggctctgctgccgcccctgaaagttcctgaaggctctgggccattcagacagaaagggcagcggcggcagcacaggcctggcatgaacgctcatacctcactgctctagaaccttccacacagtgtgtgcgagtgaaggcttcgaccccctcaggcaggggttgagacgcacgtccgggacagaaccgcgtggggcagggccgctcacctgcagaggtagtccagggccagttcggcccccgagcgcctggcaggcgggtgctgggccacaaggcctgcctcccgcagacgctgcctctcctctttcttccgttcctttttcagcttcctttccaggaccctctgctcctctggggacagctctggctctgcgtccagcccgggcctgagcacagcttcgccctgaaagtcaaggaacacattaggcttcggggatggagggtatccagagacgggtgcgctgcctggggcttcccgagcccaccctcacctcagtagtggccaaaagctctgtccccaagcactgggtctggccccagccgacaccatcctgctaagcctgtgctacgacgaagagacagacaggtcacatgaggatggccagtcctgcgggcaggcgccaggtgccaggattaactgcccagaggccccttccccacccccgtggtccacctcccacagactcccggctcccgaggctctgtgaggtcctgccccaccccacacagtgtgggaagatccgggccggcccccagggagggctgaaggtgtgctggtgtctgttatcacacaggccaggtgctggccccagacccgacccaaatcccgaggacggtgcctggggcctgctgctttctggcaggtcactggctgcctggctccccctgggctgcaggctggggacagggagggggccaagacccccaagggagggagagggcccgctgtgacaatgtgtccccagccacatcttgccaggaaagcacaggccctccgtcttgcccaccctcccctcattaacaaaagaagaggacggtgcaaagcgtcaaagccggggcagccgggccacggggtgaccatgaggtgaccccagccgctgtccacatgcttcgtcttttttggaaaagtcagaacatcagtgtagactccgagcaaggccaggagcccagggaaacagctaggggcgtgggaatcaaccaggcagcgcccaccgggagcttccaggaagggaggccgggcacagcccacgcctacgcatcccaccccagggagagcaaagaagagtgaggcaagcccccctacatacagatatatatgcaacccacccccccgacacagacacacacattcacagacttcacccctacagccaaacacagcccccaaccctcacccatgtacccacaccgacccacacccacccacacccaccatacacccacactcacccacccacacccacagacacggacacatacccacacccacagacacccacatacccacccacccatacccaacacacccacacccagatacccacacatagaccaacacccacacgcccagacacccccacatgccacacacccacatacaaccacacacaccgacacccacacacatccaacaaatccacagacacccagacacccacagatacccaaacacccacagacacccagaaacacccacacacccaaacacgcccacagacacccagacacacccacacccagacacaccttcacacgcccagacaccctgacacacccacacccagacacctgcagacacccacaaacacccagatacccaaacacacccaaacacatccacacaccatcccaacatacccacagccacacacgcccacacccagatacacacccagacacccacaaacacccagatacccaaacacacccagagacacccacagatgcccacacacccagacacccacagatacccacacacgcccacagacacccacaaacaccatacacacacgccaacacacccacagccacacccctagagcctgccaggggtccgcagcaagagacagggcctgggggacgaggagcaccgtccctggcagatgcctggcacagagaggctgaagagtcccggtgggaaggcctgggccgcccacacacacaggcaggaagctctgagacccaccaggccaggcacgcagggctctggggagcaagattttcatggtggggatgtggacacccccaggggagcctggtgactgaccggctccaaccagctccatgctcacctcctaggcccacagccgcccacagccgccaacggggcaggcacaacaactggccctgaaaggtaaaaaccctcctggcacaggcccagcctcggcccccactccatgggccacgcagtccacggctgatcacacgggccaaagtccataacactgttagggctgcacaggggccgccgcggtggccgagggtctgtcagcccacatgcgtggggcacccggacaggccctgagcaggtgggcagggccctgtggtagggtcccaggttggtggccagagtggtgaggacggggccaaggctgtgggcaacagcaacgtgggcgctggcctggggtggatggcgaggggaacccaggccgtcccatatcggggccaagccggggacccgcaggcccagctgtttcccgcaggcttcctgagcgcccggtgcagggctgcttcttgtgtcaggcaccagcctggatgctgcggaaacagcttccttcacacccactcttgcttctggccaccagcgctcccgacctggcaggagtcacagcccaattcccgtgtccccgagggagccactgtggccacgaggtgggaagctcaggagtgccacccactgccctgggctgtgcctgacactggccggtgcacctttaacttttccaaactcctgctttctgtgctgggcctcaacagaagacgcaggggcagctggagtgagggtgctgcgcccggagagccaggggccttgggggtgcccggctccactctgcgccatcggctgccccgtgctcgcgctcgctgccttgggggtgccggctccactccgtgccatcggccgccctatgctcgcgctcactgtcctggaccaggcaattccccaaggctgtgaccacgacgtgagcgacctcagctatcttgggatgacacaggcgggccccgggagggtgtgcagctggagggggcgggaggcagcaggtccaggcaggctggagggcacaggccgcggcaggtcgtggggaatgggagcagcgcgggagggtggtggggccgccaggatcgggcgtggtaatgccgggacctgctgcttgctctgcttggcctgcacagtgtctggcccggagagcacaggtgagcaaggtaggacggctgtcacccacagacgagcagcggagaactttctctaactgccacccacgtgccgaccctccaaagaacgcgggtttcactagcaaataagaacgtgggtttaattagcaaatacttttaacaaacttgacactatcacatagagctcccaaagttgccccaagggcttgtaaattacctaagtacacaccaaaaaatttttaaaagaatcccagtgtcaaataaaagcctgtgagggccccttctagggacttgagtttcaggcctaggatgcaaagcctggcgcagcagccaggggtgactccaggctcctgccggctccaggattctgggaaggggcagactttgggccccctggagcccctctaggcccagtgtccaccccacagaccctgcagtctggggccactcttctgggagaggtgttgtgggcggctttgagccgacgctgtcagggcaagagtctctctcctaacatgaaggctttccaacacagatgggacgggcctcatggaaggaagcaccggcctgtcacagacgtgtgatgtctaaagccggcgtctctggaccatcccagggcaagcagaaagtcgtacaaaagtacagtcaccctatctcaatgctaggacagtcttcagcatttcagacttgatgaaatacagacactcatatgaagtacagaaaaataaaaattccagccacacattctgtctcctgcggttagatgtcttgaggattacatttgaaaatgcataaaacaattcaatgtgcatgaaaagctttacgcaggacctgcacccacacagataaactgcgaccccgaggactgggatggggaggcggccagcgggcctgtcactgcacctacgctgtgtatttcacaacatggacacttccacaggctacctcaagcaacgcggcactcgtgcagtcaaacatgaaatccttaccatcaggcaatgaaaatgttcactgtactcaacaaatacactgaaaacaaaccacaaagccaaaccctacaggctgggaggagcaaagtggatcagctgccacagcaccttccagagaagagagccgtgagattcttacagagaagctgacactgtttgagaaaatacaactgcatgaaaactatgtttttcctttatgcctttaactcctggcaagagacacagagaagaaatgacactaatttgattttaaaaggttcccgtagactcgactgaggcagcagagacccaacagctcctttccgcccaccccacccgtccatctgtgtgacacgggccctgtgtgagccgtgctccccagcgtgaggcttcgccacaacacactggctcttcctggagatgtccaaggtgggtaacgtgctagtcataccccaacaaaaagaactggcaaaaataaaaaccatcatcatttcccaggtttgtgaatttaagccaacaggaaacgtgggacaaacacgcggggctccataaagccagcctggcactggctctggcaccaggtccctggactggacaccaatctccacggttccgaattttcctaagtgatgactgtgaacaccacatgcacagaaacgagccctgagaagggggccacattggccgccggccacggcagcgatccggccacggcagcgttccggttggtgtcaccctgtcccggcctgagcccagctctcagatccgagcaccaattctgtctacagccccttcctgcctgcgggccctccctgccctgcagggacggtgcagtgagcacaggtgtgcaggctgtgcggtgagagccccagggctgggaggagcaggcagccttggtccagcaggtcctgtgtgggggccgcgttgccgggcagggcctgacacggctgctgtgggctctgagaacagcccaaaaggacagtgacccctgcccagtctctccagcctgggaatgaccttccccagccgtggcctcacaccagggaggtgtgatgggaagtgacctgggtggctcctgggtccctgctaaattgtttgggggggctgaggggtgaggaaagagaggtggggtcgggaagaggcgtggcctccctgtccctgaggcatgagagcaggtgtgggctccccgtcccccgggcatgagagcaggtgtgggctccccatcccccaggcaccagcaggtctttgtcaacctgaggctcagggaggaatgtgcaagtccctgtctcatgaacagggtttgggccatcggagcccctgcagaggctgggttcatgcaagctgtcagctgccagtgcccacaggcatccacgccgctctggactcagggtttagaaaaagtcatctgttccagccagaccttcctgtttccccccaagtctaagggagcagagccttcacctaagaaaggagggcagagtggggagacccagggctgacccagagggcagggaggacccaggactgacccaggagagcagggaggacccaggactaacccagagggttggtgggcggggccaggactaacccagagggccagagggactgaagctgcggcctgtgggcccctaatgcccagccctcgtggaggcaccaaggcaggagcgcatcccaacacccagcccgggcttcctcggtgggcagctcctcacccacggtgaagcgaggccaaaggtcatcgagtgctgaccgccactctccttcctccaggggcccctctgtgagcaatgcccatgtgacactgatgtcacctgaccagacggaaatactcctgacgcccctcagtgaccctggaccggcgtctgtctgggcaggaccatctagtgtctgaggtgtcacatgaggatcccagacaaaacacgctccccctccggtgtcacgccagcacacagcagcacacgccagcgcacagcagcacacagcagcgcacagcagcacacagcagcgcacagcagcacacagcagcacacgccagcacacagcagcacacgccagcacacagcagcacacagcagcacacgccagcacacagcagcgcacgccagcacacagcagcacacgccagcacacagcagcacacagcagcgcacgccagcacacagcagcgcacgccagcacacagcagtgcacgccagcacatagcagcacagcagcacacagcagcacagcagcacacagcagcgcacgccagcgcacagcagcacacgccagcacacagcagcacacgccagcacacagcagcacacagcagcgcacgccagcacacagcagcgcacgccagcacacagcagcgcacgccagcacatagcagcacagcagcacacagcagcgcacagcagcacagcagcgcacagcagcacacaccagcacaaagcagcgcacgccagcgcacagcagcgcacaccagtacacagcagcacacagcaccacacagcagcgtacagcagcgcacgccagagcacagtagcgcacgccagcgcacagcagcacacagcagcgcacagcagcacacgccagggcacagcagcgcatgccagcacacgccagcgcacagcagcacacagcagcacacgccagcgcacagcagcacacgccagcgcacagcgcacagcagcgcacagcacacagcagcacacagcagcacacaccagcgcacagcagcgcacagcagcgcacgccagcacacagcagcacacagcacacagcagcgcacagcagcacacaccagcgcacagcagcacacgccagcgcacagcagcacacagcagcacacgccagcacacgccagcgcacagcagcacacgccagcacacaccagcgcacagcagcgcacaggagcacacagcagcacacagcagcgcccacccacgcaccctggtcctctgctgtgcatgtcattgagggtgtggggtctgcggagagcccggaccactcggaagccttggtctgagggccacgcgggcccagagcacctcaggctgtgggcattgggcctctgcctctggccccaggctcaggctccctggggaagtggtggccgtgctgcatcaaagaatggcagagaaaggacccactgtctctcagagggaagataaggagctccctgctcaaattggagctgcggggagggacgccaccagcccagcctgccgtgccctgctgtgcgggtgaaggggctgcagggaaggacaccaccagcctggcctgccgtgccctgctgtgtgggtgaaggggtcacctggcctggaccccgtccagtagccatgcaggggatggtgtgcatgaggcaggcgctgctgtcctacgatgtcagccgggtgacggggccagggctccagtgtcgctgccatcgggcccttggggagcatccctggatggcaggggaggtggggagggctccacacagcggggtggaggacagcgagacagctacacaccctcctgcaccttcttctggggaaacaagacacggactcaatgcttacgaactttcctggaggggagacttctccagtgggatcaccccaacacgtgaactgactgccgcgggcagccgcggacggcgggataaggggcagccgcggacggcggggaaggggcagctgcggacggcagggtaaggggcttctctgcccccgccccccactgcacacaaggccaggcgctctggggcccagcatccagggctcaaaaccacacccgccttggtgggatggcgcctcgcctttcccatgctgcggtaggaacaccccatgtttgttcggtgcattttattttctaaaatgtggcagaaagaaaataactccagcaggtgacagaagacctagtagaacttagcccaaatttaaataatgacccaaagtccccacggggctcagacgttcccacaccctaggcagaaatccccactcacacgagcacgcatacacacgcgtgcacacatacccctgccatcatctctgctctctccattgagccctggctaagcaccagctcccaccaggcaggaagcacaggcccaggacacgcacactagggcttggcgggtggggtccaagtcaggaagtgagagccgaggccctacaggaacagggggttgccccttcaacaggtaacccatataaaaagtgactaacgaaagcacgtctttcttctcactccacagctttgaaaccagtgtgcattgtacacgtggagccatctcagacccagactcaaagtccgcctggctccggccatcagcctgtggcgtctcagagcctggccccgagcagagaggagatgtgatgaggagacatgacgagggagtcgtgatgggcacacccatggccagcaggcccagcctgtgcctctcggaggtccgcacttcctgcccagtgggagcaggcacctggcgtgggctccagctgaggtgtgcacgcgggcgggtggggtccagcccagagtgtggtctttatgtaaatcagggtggagctcaggtgcactggctcacacatgttaatctgagtgctttgggaggccaaggtgggaggctggcttgagcccaggaattcgagactgcagtgagctgtgatcacaccactgtaccccagcctggatgagagtgagaccctcaaaaaaaaaaatcaatagatcagggctgcgccccaggtcttctacctcgggggtgggtgataggctcgtccagctggtggtcccaggacaagctctctgtccctcccaggtgttccatagtctaggacagtgcaggaactgcagacttgtcaagaactggggagtggtccgggcgtggtggccgaggtgggtggatcatctgagtcaggagtccgagaccagcctggccaacatggtgaaaccccgtctctactaaaaatacaaaaattagccgggcatggtggtgcacgtctgtaatcccagctacccgagaggctgcggcagaactgcttgaacccgcggggggcagaggttgcagtaagccaagatcgcgccattgcactccagcctgggcaatagagtgagactctgtctcaaaaaaaaaaaaaaaaaacgggggggggggagtgaaagggagggaggaagagggtgagggtttggaggggcccaaccaggcccacctgtggttgcatggatctctagccacctgcaaagccagaaggtaccttgagctgacaggtccgtgttgttcaatggttctatagggaaaatcctgcccccatgccaggttgttgatcacccacggtcaatgctggaaggggcagctgctgctctgggccagaaggagaggcttcctggcaccgtgaggaggctggcctggctgctcacagctcccggcagaaatgcggagcggggtcctcactgcagcacccgggcttttcaaaacagtgaagccctgagtccaagaaggcaaaccacagagcggaggtggccgtggggctgccctgtgggcagaggggaggctgcgcaggcctagtggctgcaggaagctccagtggccgccaagaacctccaggcccatcaccacgaggagggcccccactgcagccagggcttccagatgggcagaggcggtgggaagcaagcaggaagcggagactggttggctgtggccctgacccctcttctcctgatggagtgtggggggctggggctgcctggggtcacccactcaggtctctcactcctgccctcccaggaagtggacagttcccacagcctggacccagaggcccgcaggcactgaccgcggcccggaggccaagctacagtgcgtttcccgagggaggccacggggcacctggacgagggcagcttaggacgctcggctctcgtctcaggaatcccagggcagaagtccagcgaggcggcaggtggccggcccgtccccagcctctcttcccactgaggagagatccaagggccggcggagtggtggtgtctgctgctctgcgggaacacgggcaccaggcccagcagtgcatggatgcggcaggccccgcgtgcgatgccctggtccccacgactgtttcttcccacgccgcggagtgcattccctcatgctcccgtcctgtgaacacgcgctgcagcctctgccctcctggggctccctgagagagggggcaccccttgctcccatcacagtcctcctgcagcctggggccccgcccagcacgcccaccaaaggggaggcccgctctcctgtcagagccaggacagcctctccaagaactcttcctgggccccagagaggagccccctaggttcgcttctcgccagccgctgccccatcttgcgtctccacccaagggcccctcggcgcccccacctggagcccccactatcgagatatgtctggcggataccacacacaagggggctgtagcgggttggggaacaggccaacccctcccagactgcagggacagctagtctcacacagctaagaccaagatgatgtaaggaaatgaatgacagtaaacccagcccttaccgaacccacctcccgagcagggaggacctgcaggaaacagaggctcccattcctgttcacctctgatctcaggggcagacaccagcccatcactgccgtctgctgaccacccctgcagacggcctgggccttggatgtcctgctcctctgggctccccaggctgtgtgaaacggaggagtgcaggggtcaggacccctcgactttcttgggggcaatcaggccgtttgtaacgtcctgatacagcagagctggggactggggttacgaaagacaccaccaggtggagccttcagatgggacctcccagcagggcctccaggctggggaccttcaggcaggtacctccaggctggggaccttcgggcaggtacctccaggttggggacctcccagcagggcctccaggctggggaccttcaggcaggcacctccaggctggggacctcgcagcagggaactccaggttgggaacctccaggctggagacattccagtagggaccttctggttggggatcaccaggttaagaacctccaggttggggacctccagactggggacctcccagcacggacccccaggttgggaacctccaggctgaggatctcccagcagggacctctagtgtggacctccaggctggcacccatggggcaggtttctttcttcttccccagaagccttttcatcgtggcagtaggacctgaccttgacagagatgatattgcggatttcagtgactgaaccagagtcggaagctgaagggctctgcccagccttcctgtcttcatccattaagtctgatcggcagtggtggccacctgggctgctgctttgacaagatgccagtagttggagctgggaccccagggagcactgtccatccaccgcacaggagtagggcttcagcagctgtcagtcatcaatcatttccccatgctgttggatgggagagggacaatctgccagccccagtgtgactggctttgctgccaccgcagtgccctctgggaaccccggcaggtcggctggaggcaggacaccacccccctaacccctccctacttgtcaccagacagaaaccacagctcaccaacaaccatacacaaacagcgcactaaaagaaagcatgcggcaaaaatacccgcccagcgagaactgtgcctggcacagggaaacacactgggatgcgcgcccttccgcggggcgaggctgggttttggggtataaactgagtcctggggagcaggagcctgaggggcacccagggcagctccctcggcctgggtcacaaggttcgatcctccgcgggggtggcaggaaagcccaagtccctcggcacacccaggtgacagcgatgacggcccacaggcgtggcgcctgggccacatcggacaggccatgtcctggagcactcgaggccccctggacagggcaaccaaccctgagtccaccggagtctgctcgcagaccaccaggagccccgctgcactgttcgtgagccacggtggtgacggcagctcaggagggaaggaccagaagcctggccccgtcccacgaggacagacgcaggcctgcggggaggcatgtccccacccacgggcgcctcctggaccacgagctcctctttctcctgcatcgcctcagaccccacccaggggttccaaggtcaggagcctggtcccacgtcccacagccctctcatggggcacccgtacggattctgttccaatttaaagaaaaccttaatcagatttgtcacctcaattattagaatcccacggcgttaactcacagtagtaaactgctttttctgagaaacaagagttttttaaattaagccttttattttaacgcaatcgcaggtgacggccgtcgtgagggaacacgggacgcccacgtgccctccaccacctcctcccacggcaaccctcgcagagtagccaggaccacattcggatccggactctgaaatgacagtcccacaaccaacagcatcgatgtggtcttcttaatgatcagaaacacacaggggattaatttactcttattctgcaaaataaacaagctctcaaattctttaaaggtgaatcccccccaaccgtcctccctccccagttacttcctccctaggacaccagtggaacatcccatgctctcccccttccatgttgataccgaataaaacacactgcatcagaagacccacgcatacgagtccaggggctgctacaaagcgcggcgacgtctccgcggcgagctggccactccatggtcccggcgcagacactggggcaggcgccggctctgtcgtcgaggcgctcacaggcaggcacacgtgagctcctggaggacagggagagcggccgccccgcccctgcggagcacaggacgcttcctgccacccctgcagagcatgggacgcttcctgccatggtgccgtggcaatgggtggcacctgcctgtggccccttctcagaaggacgttttaaacgcgtgaggtctgatgcacagccacagggagacacagacgagcagatgtgggcatccgagtatttacaaggtctggtggctcctgcagccgcgacacgggctgagcgcaagtgatgtgtgaggtgtccccaacagatggcacggggagcgcccacacccgccaccgcggggtctgcggaagctcgtgtcagctggaggttagggaagacgcacaggggctcattctccacccaggttcaaactccctgaactcacgagacccaggctgaagacatggacagactcccagccccagcgcccctctgacagcacacccgaggcctcctgggaacctgggaccccttgcagggtcccccgcaggctccttcctaggaaggaggttcctgccctactccacatttctctccatccaacttccaactccttcccactgggccctggagaacatgacgaagactgtgggggcctcctcccaggaaacacacacacacacacacacacacacacacacacacacacacacacacacacaccagcaacgcgcccagaccccaatccctggcagcccaactcctcgttctacagagaaggggtgaggatctccaggggtgactgctcacatctcggcacatgtagaaggcagggctggagcagcggcccctgcagcccaggccaggggactggaggcccttccacagcagccctttccttttgatacacggtcttgctctgtggcccaggctggactgcagcggcaccatcacagtttactgcagcctcgacctcctgggctcaagcaatcctcccacctcagcctcccaagcaaccaggactataggcatgtgccaccatgcctggccagtttttaaattttttatagagataggaccaaggctgctctcacactcctgagctaaagtgatcctccttgccggcctcccaaagtgctgggattataggcatgagttttcaaactcctgggccacagcgatccttccggccagcctcaaagtgctgggattataggtgtgagcccacggtgcacagcccccactttcttcctaaaaaccctgcagcttggctgacagtgggacctgcctccctactcccgcctgcaggagctcagaagcctcagctcaagaggagcccttgccagagacgtgggaccaggaatgggccccacagagccctgcccgtgggcttcctaaacagcctgagttcagctgcacacaccaacgatgtaggcgggttgcaataaacagcaagaaacggacccatgggacaggagagacgcaggagccccaggggacaagagagacgcagaagccccaggtgcctttggtggccagtgctgaatttcgcaagcaacattagaaactttttatttctgcttttctcttaacccaagggtgaaaatggaaacctgtggtgtggggcagtctgctgaacgctaggatgagggcggggaacaagagccaccctccccgctgccacctggcccacaagagccttcccaggggctctccagtttcagcccctccttgccgagccagacagcgctgctggcctggacgggagggacacccaggctgactgagtgggggagcactttttataaagatcagatcaggtttctgaaaacaaaaagcccccagatcctgcgagcggctatttagacttgatgcacactccaccatttcacaggtatccattccccagcgtcacacatgcccatccccagctggagcacactcttcagtgtggaggacagaaggagcaggcagaagacgaccccggggcgctgggggagcaggtgcgggctcccacatacctgctctattctggttggaggtgtcacaagggaaggcgtggagatgctgccaatggggacatgcggcaaatgcgcccccttcgccccacacctgtcagcagctagcaacaactcagtcctgactgctggagacccagccccaggggcaggcaggttgggatccgctgctcaggaggcagctctgggccagggtggaggccggagaagccaggcacctccccgcagagctctgcagaggccagtctgctaacggcttcatcactggagtggcggctgctaagagcaaagcctgtgcttggtacctcagggacctaaataagaaccactccctgttccaaggatcccaagtggggggaggacgagaagcagctgagcctatagggcacaggaaactcactggggtgtgggtgctggggacttgggttgggtgctgtactgagcaagcctgttgtggggggacactgctggcggtgggtgacgaggtgcacaagtcaggtcagggagggggactctgccctggcaccactggggcacaggacactggctcaggtgtcagctgaggaccccccagtgtaggcgaggggctcacagccgctgaggcctgtggacacagctccgtgtattctgaggtcgcagagcacaagaggttgggggtgtgatacggaccgacctcgcccatccaggaggaatggggctggtaacagagctttgtaacccctcagcaccggtagaggttgcgtggctccccagtggagctgagggctggcgtttcttgctctgtatttccctgcgctctggaaactcctgcatcaccagccttgggcccttcactgcctcccctgggcctccagaggcaggctggggtcctctcctttctcagcctctgtggccagtgtctggcacaggacagacacccaccaggacgctgcctgggacggagggctcccttctgcctccggccaggtgggccccgcagcagctcaagcttcagctgcagtggagggaagagtgaactgctgggcagaagcagaagcaggcctcctggaactcgtgaccccagatcccagaggccctgcccccttgccacctcccagaatgttggcagggcctctgggtgattttcatccacatgcaggggtgtcacataggcccctcggctccagctccccactgaacggcagctttgtatccacaggtagggctgggcggctccaatttgaacttaggcatatggacgctgtctaacgattcacgacactcctcgtttctttcgctactattggaccagttgagggtggagcccagctgcacctggcattgctgaagagccctcgcagagccagcgctccagctgctgggcgcgcaacagctgtcccgggaggcaagggttcgcacggcagtgcttctgtgtcgacagaggctgtgctgcagctccctgccaggcccgtgtccttcctagctgtgagaacactaacctgcctgggcttcacctgtggaagccaccgctaactagcagtcggaggcggcgttgtttctaagacaggcaggcagctccggcaggagcagccgctaagcacaaggacggccaaccacacaaagcctgcttctcaaccactcgcaggaaatcggctcacagttgctccccattcttcaatgctgatcctgccactttactgaaaatcacattattaacgtttaaaaaacgtatgggaaccatgcaaagacatccacgcccctcagttgctgccgctccagcacctggctccgaagtctgtgcagaaggcgaggctcccgtagtgctcgagagggccttgcacgctccccgtggagggaacaaagctacgtggattttccagcgcgccgcccacttcaccaggcagcctctgggcttcatcctgctcgcgtgacaggtgtgctctgtgctgtcaggaaactgcagggctttgagtataaactgaaaacagcaaaactatgttctcatctcagaggccccttccttctcaccccgaggtcacctgggcccggagacacagcacccgccgtgcaggagcctggaagatgtttgagcaacgagaaaaaaaccagaacatgttaccgcctctaaaatgaggaaatggcaggatcaaaattaaatgtccgtgaagtgtatcatcatgtcaattttgttagttgttacacatagtttaaaacactcacatctgggaactaagtacgggttaggttttctcactttgccacaactcctcagtgaacacaacgaattcataaaaatcactgtcaattcggtgagttactcataagcaaaggactctgaagcaacggtcaccattcccgccgtctctgcagccgtgaggcccagcagcaggctaggcagcccggttcgcgtgtccgtgcggacgcctggtccacggcccccggctgtgcgcgcagcagctgaggacgctccgaggacacagcgcaggaccagcacggggccgccacctgcccgggccaccgcctcctcagaagataaaagacctactccaagcacctctgcgctctccaacccaaacccggctgagccccgacgcagcagcggcagagcctcttgaaggagctgccggcctgctccgccgtcctcaggaaggctcccgagtgaagctatcccaattgttttcatcatgagtctttgctttagttgacacagcttcgcactagcacccaccgcgccagtgggggccgccttgcctcaggcaagaaagcccctggcttccgagcgcccgacggggtcctctaccccggcacagggaggggcgaggcggcgctgcgggcgacacaggccctctcaagggtcacgcggcggccgacgactccagcccacccagggtcctcagagctcgtgtctcccccgggggctgctgcatcgcggctgggggcccggtccgcccccacagcgcaggggagcctggccggttgcggggccgctcgagggctcgcagtgcctgcagggcctggacccccaccctgccacccgcggcccggccctgcgcccccaggagagtaagtgggaggagggcgcgggaccgtccagggcctgctcggggaccggcgcgcagcggagccccgagaagcgcggctcggccggcccggggtctgcagggcggagcggggcccgcagcagcgtctggacgccacggcctcccacgggagcgcccacctgtcgccgcggggcggggctggggcagggcccctcccatcccctccctgcagcccgaatgcgggccctggccccgcgcactgacctctgacccggctgtcaggtcccgcgggcacggacggcgccggggcagggatgcgcccgcagtgcgcaccgcccggcccgcgcctccagcagcctcagcgcctccacactgcgcatgcccggccggcccggcgcggctggaaccagatccagccggctggaccgtgacgccagcgcgcctgcggggactggacctcggcgcgggggtgggagagccggggcggggcctcggcgctgagaaggcgggggtggaccctgctgcagcccccactgctcctccgacgaggctctctggccgcccgggtctccggtccacctgcgcgaactgcggggagggcgcacccccgcccgcgcagggcccctgccagctgcacgtacttgcctctgaccgcccccacccagcccctatcgtccccctacttccctcatctcccccatctgcctccattatcctctcatctcccccaatctgcccccatagacccatctcccccagtctgtccccatctcccctagtctgccgccatctgtccctatcgctcccccaatctgactccatggcccccatctcctccagtctacccccatcttcccagtctgccatctccccaatctgccccatctctccccagtctgactccatgtccccccatctcccccagtctgcccccatctcccctgcccaggccctgcaggcagaggcctagccctcccatggcatccacgtgtccagcaaaggggaggtgctcaataccggctggctgaatacgtggatgagtcacgcagccttttcctcaccacacagagggcgtctagatctcttctggcttgtgagttccctgccctgggactaagactgcagatcagtttttttgcttgtttgtttttggagatagggtcttgctctgtcgcccaggccagagtgcagtggcaccattgtagctcactgcagccttaacttcctgggctcaagtgattttcccaccttggccttccgagtagctgggaccacaggagtgcaccactgtgtccagctaatttttaaattttttgtagagacagggtctcactacgttgcccaggctgttcacgaactcctgggcccaagtgatcttcctgcctcggcctcccaaagtacggggattacaggtgcgccaccatgcccagcctaatttttaatttttggagagatggggtctcactatgttgcctggcataggaggctggaactcctggactcatgtgattctcctgccttggcctcctaaagcactgactgggattacaagcatgcaccacggtgcctgccttgcagatcaattttatggtgcgagggagccgcactggccacccagagcacagtgagcccggaggctgggccggttccagggcgaggagaggcttagactccctctcaaggcgtcagggtccaggacacactgagctctggtcgcggggccctgctctggaggccacccctgcctggggagatggtgtgggcaccccagtcccccgctgaataaggatctgcaaggccggagtcaggcctggggctggctgttttcctcctagctgtttcaccatctccaggcctgttcccatgcagaggcctgctctgtggtggcagcggggcaggcaagggtggactggaggcctcctggagctggtggacacgaggaggccaggaagggatgtcctgcccactgcctgcagcggctatgcagcagtgcttccgatttagtgtctctgccactggtgtccgcaccccgctttcagagaaggaagtgtgtgctcagtcaccggtttcatgggagggactcaattctgggccttctgagccccagtggccttgtgtgctgactccccagtgtgtccccagcatgaatgcgccagcccacacagtcacctgcctccatgaacgcgccaactccgcgcatccacctgtcttcccgaacgcaacgacccacgcatccacccacctccataaacgcgccaatcctgctcatatgccgtcttcaccaacgcaccaactcgcacagccacccgcctccacacctgagcccggggaccaggtttcttctccccgtagttctgtgctggtggctctgggctgctttgggagacaaggacaagagcaggagcgggagaagctggcctggcagtggggtgcagtcccccgggctgggccactagccccacagggatggggacgtggtgccggctgaggacccaggggcttcactccactccatctcacgcttccagctaccctgctctttgcacttcacagagggggaaccaagcccagcaaaggtggacacataccagctgctatgccttcctaggtcctgcccagtgacccacctgtagggctgtgctgtccccagacccatgaaggcacacataggcttgtggctttgggcaggtgggactctctccccaggcaggcggggactctctctctcccggggcagggggggactctctctctctcccggggcacgcggggactctctctctctccccgggcaggtgggactctctgggcaggtggggctctctctgggcaggtgccaccatgcctgctttcccacagcccacaccccgggccccaacacagagcagcaggtgcaaggctgcttactgcaccggcacatccaaccacctccacaaacgcaccagtccatgcatccacccaggctgagctaagggccccttgtacctagtacagtctcaagggtggagtggccaggagggagccctcccactgccttggcttgaagcatcagtggccagtggtccacactgagaccctagagccccctcccccagcaggtcggcaggtcctggtcaggaggaggggccaagaggaaaggaagggcccccagatagctggtgaactgcttccgtacacgggatgccgttccacacgctacatatctggacagaacaagacaaagatgcgtgcccattgagaggctatgctgaggctgtaataatactgaggagaaaagttaagggtaggctgtttttctgagatttaaaatggttgggggaggaaggaaatcagcgaaacagcaccacaggcggctcctgggcagagaccagagacctgcagggagggcagagtggtccgggggggcagagacctgcagggagggcagagtggtccgggggggcagagacctgcagggagggcagagtggtccgggggaccagagacctgcagggagggcagagtggtccgggggggcagagacctgcagggagggcagagtggtccggggcggcagagacctgcagggagggcagagtggtccggggcggcagagacctgcagggagggcagagtggtccggggcggcagagacctgcagggagggcagagtggtccggggcggcagagacctgcagggagggcagagtggtccgggggggcagagacctgcagggagggcagagtggtccggggcggcagagacctgcagggagggcagagtggtccggggcggcagagacctgcagggagggcagagtggtccggggcggcagagacctgcagggagggcagagtggtccggggcggcagagacctgcagggagggcagagtggtccaggtgcggggggcggccagcaaacaccacccggggaacgggccgagagtgcggggtggctgcgaggacgtgccgagggggtgagagcaacctggtcaccaaaccttccccaggtaatgagaattcgccttcgaaacctgggcccaggcaccccaagaccatgtggaacattctgagtcattcaaaaaagacataactatgtctgacgcattcttttaattaactgccctgctcaggtggtcagtgggccccacttcccagacacaccacgccccagagaatgcagggtagatgggccccagatccagagaactgctcccggcccacggggctgccccaacacgtccctcgcactcggcccgcctgaaaataaagtctctgaaatggaacctggggctgaggatgaagccccccgcaggtggatctgctgttggccagagcagagaaggtgccgtggaggcctcggcgaggctcctgtctgccaaatcactttcgtggcatcacgagaatccactgtggaggtgtgagggccaggaggccctgagaagtggaggccctggccctaagaggccacagccacccacccacaccgccaggcacccccaggtgacagtggccctcagaggccgcagccacccgcccacaccgccaggcacccccaggtgacagtggccctcagaggccgcagccacccgcccacaccgccaggcacccccaggtgacagtggccctcagaggccgcagccacccgcccacacctccaggcacccccaggtgacagtggccctcagaggctgcagccacccgcccacaccgccaggcaccctcaggtgacagtggtgcccttgggctgctccagtctgtccatgacaggcaggggcaggaaaaccacccaatcagcaggtccccaagagaaaacactggtcggagtcgccagaaagcacgatgctagggtactgcacgtatgtgggcagcgcctctgccccaagcatccttcctccagcccagtcacactgtctgcctgaccaatcctgcacgctcctcactaccctgcccggataccccctctctgggaaacctgtgagccccaggttgctggagggcctctcctctgtgcactcgcggtgcggacccaggccacggacagtctcggcaagtccgttacacactgaaagaagacctaccactacctcgatacgagggaacacagcccagctcggtctgtgaagctagtagaaccctgatacccaaaccagatgaaaacaaaactacggactaatatccctcataaatacagacgcaaacatcctactcagcaacatggaaaaagagtcacacaccatgcatgacaagtggagttcactccagaggtggaaggctcgctcactatttaaaaatccattgggccgggcgcagtggctcacgcctgtgatcccagcactttcggaggctgaggcgggcggatcacctgaggtcgggagttcaagaccagcctgaccaacacggagaaaccccgtctcaactaaaaacacaaaaattagccgggtgtggtgggttatgcctgtaatcccagctgctcaggaagctgaggtaggagaatcatttgaacttgggaagtggaggttgcagtgagccgagatcacgccatttgcactccagcctgggcaataagtgcgaaactccgtctcaaaaaaaaaaaaaataccatcgatataatgcaccctatcaacaggctacagaagaaatacgacgtggtcaaaccaactgatgcagggggcatgtgacgaagttcaagacccacgcgtggtaaacacccaggaaatcggtaacggaggtgcctcctgagtgaggtgaggagacacccaggaaatcggtaacgggggtgcctcctgagtgaggtgaggagacacccaggaaatcggtaatgggggtgcctcctgagtgaggggaggagacacccaggaaatcagtaatggaggtgcctcctgagtgaggtgaggcacatctgcaggtgctcctccaaggccaggagcagggcaagggtgtccaccctcccactgtccccactgctatccagcatcaggctggccgggggccacaggcaggaaaaggaccagaaaggaagaaatataactctctgtatttgcaagcggcatgaccgttgatgcaggaaatctcagagaatctacgaaataaatcctgggactgtgagtgggttcagaaggcatgggaccgcagacagtcagggagctggcaatgggctcgcggaaactggcattcccgtgctaccaccacctacgactgctcagcaacaaggaaatgcttagctgtaaatttaacaaaacctgtatgggacttaaatgctaaaaaccacaaaacactgaagaaacaaactttgaagaatccaaataaatggagagacacattgtgttaatggacagaacagacagcagagtcaagacataaattctcccaaaattgaggtacatgtttcatgcaactcctaccgtaaatttcagggtttttttttttgtaggtaaagacaagattattctaaaacgtatatggaaaagcaaagtaacaaggatagctaaaacagcgctgaaatacgatgactagaaggaactgcatgcctgatttcgggacatcggacagctgtggtgcagcacgggcagtgggagacacacagaggaacagagaacagtgaacccaggaggtgccccatgttagcaatgtgattttttcaaaattttattttaggtttaggggtgcctgtgcaggtttgttatacaggtaaacttgtgtcatgggggtttgttgtatagattatttaatcacccaggtactgagcctagtacccagtagttatttttcaccttctctccctcctcccaccctccaccctccttttcctcctccctcctcccacctccaccctcaaattcactcctgtgtctgttgttcccttctttgtgctcatgagttctcatcattcagctcccacttatagtgagaacatgtggtatttggttttctgttcctgccttactttgctaaggataatggcctccagctccatccatgttcccagaagacatgatctcactctttttaatggctgcatagtattccatggtgtatatgtaccacattttcttcatccaatctgccattggtggcatttcagctggtgtcatgtctttgcgactgtgaacagtgctgggctggtgtcatgtctttgctattgtgaacagtgatgggctggtgtcatgtctttgtgactgtgaacagtgctaggctggtgtcatgtctttgctattgtgaacagtgctgggctggtgtcacgtctttgtgactgtgaacagtgctgggctggtgtcatgtctttgctattgtgaacagtgctgggctggtgtcatgtctttgtgactgtgaacagggctgcagtgcacatttgcatgcatgcatctttatggtggaaagatttatattcctctgagcgtaaacccagtaatggagcaatctgatttctgacaaagtttgtaaaggcaattccatggggacagaaatcttttcaacaaatgctgctggaacaacgggatgtccacaggaaaacaataaacctcgaaccaaagaagatttacagatggcaaataagcatggggccagacgcgcgacatcctttgacgtgagggagcgcccatgaaaatagcagtgaggcaccgcacacctgtcacgatagcccaaatccagagaccgacatcaccaaatgcgggtgaggatgtggagcaacaggaatgcactcatcgctgtgggaagtgactgcaaaatggcacagtcacttggaagtcagctggtggtttcttaccaaagttggcaaaatcctgccacaggattcagcaaatgtgccccttggtattcacccacatgaactcaaaatttaggttcacatgaaacctgcacacagatatttcgagcagttttattcataactgccacagattggaagcaaccaagatgcccttcagtaggggactggataactgtagtccatccagacagcacaagaaaggctctgtcatgccgtgaaaagacgtgagcaagtttaacagcattctgcgaagtgacaggtgccggctgaaaaggctgcacgctgtggggtcccaccgcatgacattctggaacaggtagcaccatggagccaggaaagggttccgtggtggtcagtggtggtggggagggagggatgaatgggtggtgcacagggcccttttggggcagtgaagctgctgcgtgtggtgctgtaacagtggatgcacagtggatattcatttatcaaaacccacagagcatgccataccaagaggggccccccataagctgcggacttcgggcggttgtgctgtggccatgtagggttcgggtgctcgtgctgtggccgtgcagggttcgggtgctcgtgctgtggccgtgcagggctcgggtgctcgtggtgtggccgtgcagggctcgggtgctcgtgctgtggccgtgcagggctcgggtgctcgtggtgtggccgtgtagggttcgggtgctcgtggtgtggccgtgtagggttcgggtgctcgtggtgtggccgtgtggggttcgggtgctcgtggtgtggccgtgtagggtcatcactgttgtaaatgcactattcagggtgcagggtgttgataatgggggaggccgtgcatgtgtgtcaggagggtgtacatgcaaactccatcatctgctcaattttgctgtgaacctaatattactcttaaaaaaaagtctattaaaaaaaatccgataggggaagatggcggctgctcctttggaggagcgggattgagaggatcggggtggggagaccaaacaagagagacatttctggctctgaaggcgaacgcttcgctggccatttaggagctctgctcaaagccagacggccaagcgtggtggctcatgcctgtagtcccatcactttgggaggctgaggcaggagtatctcttgagcctaggagatggagaccggccggggcagcatgtcgaaaccctgtctctactaaaaataaaaaaaattagccaggcgtggtggcatgcgcctgtagtccaagctattctggaggctgaggtgaaaggattgcttgagcctgggaggcggaggctgcagtgagccgagatcacaccactgcactccagcctgggtgacagagtgagaccctgtctcaaaaaaaaattttttttagcaaaccagtaatagaaaggatttacttcagtctgataaagggcatctacaaaaaatctgtagttatgtcatacttaatagtaaaggagaaatgcctcctccctaaagtttggaacagtacaataaggcaagaaaaagaaatgaaaaggcttttagaacagaaaggaagatgcggagccgaagctggactgtactgctgccatctcggctcactgcaacctccctgcctgattctcctgcctcagcctgccgagtgcctgccattgcaggtgcgcgccgccacgcctgactggttttggtggagacggggtttcgctgtgttggccgggccggtctccagcccctaaccgcgagtgatcccgccaacctcagcctcccgaggtgccgggattgcagacggagtctcgttcactcagtgctcaatggtgcccaggctggagtgcagtggcgtgaatctcggctcactacaacctacacctcccagccgcctgccttggcctcccaaagtgccgagattgcagcctctgcccggccgccaccccgtctgggaagtgaggagcgtctctgcctggccgcccatcgtctgggatgtgaggagcccctctgcctggctgcccagtctggaaagtgaggagcgtctccgcccggccgccatcccatctaggaagtgaggagcgcctcttcccagccgccatcacatctaggaagtgaggagcgtctctgcccggccgcccatcgtctgagatgtggggagcgcctctgccccgccgccccatctgggatgtgaggagtgcctctgcccggccgagaccccgtctgggaggtgaggagcgtctctgcccggccgccccgtctgagaagtgaggagaccctctgcctggcaaccaccccgtctgagaagtgaggagcccctccgcccggcagctgccctgtctgagaagtgaggagcctctccgcccggcagccaccccatctgggaagtgaggagcatctccgcccggcagccaccccgtccgggagggaggtgggggggggtcaaccccccgcccggccagccgccccatctgggagggaggtggggggtcagcccccccgaccggccagccgtgccatccgggagggaggtgggggggtcagccccccacctggccagccatgccgtccgggagggaggtgggggggtcagccccccgcccggccagccaccccgtccgggaggtgaggggtgcctctgcccggccgcccctactgggaagtgaggggcccctcagcccggccagccaccccgtccgggagggagatgggggggtcagccccccaacccggccagccgccccgtccgggagggaggtgggggggtaagccccccgcctggccagccgccccgtccgggagggaggtgggggggtcagccctccgcccggccagccgccccgtccgggaggtgaggggcgcctctgcccggccgcccctactgggaagtgaggagcccctctgcccggccagccgccccgtccgggagggaggtgggggggtcagccccccgcctggccagccgccctgtccgggagggaggtgggggggtcagccctccgcccggccagccgccccgtctgggaggtgaggggcgcctctgcccggccgcccctactgggaagtgaggagcccctctgcccggccagccgccccgtccgggagggaggtgggggggtcagccccccgcctggccagccgccctgtccgggagggaggtcggggggtcagccctccgcccggccagccgccccgtctgggaggtgaggggcgcctctgcccggccgcccctactgcgaagtgaggagcccctctgcccggccagccgccccgtccgggagggaggtgggggtgtcggccccccgcccggccagccgccccgtccgggagggaggtggggggggtcagcccccctgcccggccagctgccccgtccgggaggtgaggggcgcctctgcccggccgcccctactgggaagtgaggagcccctctgcccggccagccgccccgtccgggagggaggtgggggtgtcagccccccgcccggccagctgccccgtccgggagggaggtggggggggtcagcccccccgcccggccagccgccccgtccaggaggtgaggggcgcctctgcccggccgcccctactgggaagtgaggagcccctctgcccggccagccgccccgtccgggagggaggtgggggtgtcagccccccgcccggccagccgccccgtccgggagggaggtgggggggggggtcagcccccccgcccggccagccgccccgtccgggaggtgaggggcgcctctgcccggccgcccctactgggaagtgaggagcccctctgcccggccagccgccccgtccgggagggaggtgggggggtgtcagcccccccgcccggccagccgccccgtccgggaggtgaggggcgcctctgcccggccgcccctactgggaagtgaggagcccctctgcccggccactaccccgtctgggaggtgtgcccaacagctcattgagaacgggccaggatgacaatggcggctttgtggaatagaaaggcaggaaaggtggggaaaagattgagaaatcggatggttgccgtgtctgtgtagaaagaagtagacatgggagacttttcattttgttctgcactaagaaaaattcctctgccttgggatcctgttgatctgtgaccttacccccaaccctgtgctctctgaaacatgtgctgtgtccactcagggttaaatggattaagggcggtgcaagatgtgctttgttaaacagatgcttgaaggcagcatgctcgttaagagtcatcaccaatccctaatctcaagtaatcagggacacaaacactgcggaaggctgcagggtcctctgcctaggaaaaccagagacctttgttcacttgtttatctgctgaccttccctccactattgtcccatgacccagccaaatccccctctgtgagaaacacccaagaattatcaataaaaaaataaatttaaaaaaaaaaaaaaaaaaaaatccaggctgggcatgctggcacatacctgtattcccagctgcttgggaggctgaggtgggaggattgcttgaggccaggagtttgagaccagcctgggcaacacagtgagaccccccatctctgcaaaaaaactttaaaaattagacaagcatggtggcacgcacctgtactcccaggtactcaggaggctgaggagtgaggattgcttgagcctgggagttcaaggctacagtgagctatgattgcaccactgcattccagcctgcatgacagagtgagaccctgtctcaaaaacaaaaaacaaaaccaaaacaacaacctaaacctcacaaaaaatgaactcaaatagatcatctatttaaatgtcaaatgtaaaactataaaactttgataagaaaatgtaggagaaaatgtttgggacctgggagtcattgaggaattcttaaccatgacaccaaaagcagatccttaaaattaaaaagaacaaaaaaaaaaaaaaggataaattagacttcaccaaaattaaaaagaaaacagccttttctctgcaaaaccctcattaagaggatgtaagagataagctatggactgggacaaaatatgtacaaaccacacatacacaaaagcctagcgtctagaacacataaacaacgagaaggcgcagctcggagcagggctgggaggatgagcaaaggcagacgtgccggctgcagccgcgctccgtgagtgagtggctgctgcatgccgggcctccagctgacagtgcctcccggggtcaacccgaagccagaggctcggcagtatgctggagacccatcctgggcacctcccacgttccctgtgggaacagctgcttctgcagaacatggaaaaggtccaggctggaagctgtgcagacggaatttaggaagagggaatggagagactgcaggagggagggaggcccctgcacggcaaggtggtggccacatgctccagaataggacttgggctccgcactgcagggaacgggacctgggctccgcgctgcggggaaggggacctgggctccgcgctgcggggaaggggacctgggctccgcgctgcggggaaggggacctggggtccgcgctgcggggaagggggcctggggtccgcgctgcggggaagggggcctggggtccgcgctgcaggggaacgggacctggggtccgcgctgcggggaacgggacctggggtccgcgctgcggggaaggggacctgggctctgcccagggactccacaattccttactaatgttactgccgtttatgggggctctgaacaacaccacgttttactaacacatgcacagagtgtcagatgatgacatgctgtctcacttatgctaaggctcactctcattttatcatctgtaacgtcagggtgcgccttataatcaacaggccacaaagaaagtcacaagccatactcacaagaactaggaagttcgttgcaaaatattccttgtccgtgatcagcacggcacacactatcagactcactctgccaacacaatcactagagaaggttcatctccgaggggaacgccagccagcttttcccaccactccccgcccccccgagaaagcccacgtgcagacagacccaggccagctgggcccctctccagctcctgaccagcagccccggatccctgggtggcgtgcagctgaccttccggaccgccactcagaataagcaagaaagcctgccgacccgcctgaatgcggcaggggaaggggaagggcggccccaacatctccgtgagacacgcggctgcatcacagcagcctcggcagtgcgcggggctgcagaatcaggtgcacaactagggcatcccccacccgcaacacacacggcacacaggagcctcggcagtgtgcggggctgcagaatcaggtgcacaactagggcaccccccacccgcaacacacacggcacacaaccacagaggcacggccccaggccaggagcgcacaactgccctcaaatgccctcagcagccacggcacacagccacaaacacatgaccccaggccaggagcacacaactgccctcaaacaccctcagcagccacacaggggaggccacgtccacgtgacttcaaccatcaacactagactagggtgcaaccgcgaagctgagtcagggccacacgcccccctacgccccaatctgtgcccacccttccccccaccaactgagtcttgtacaggggctggccaggacccttggatacgcagctgcagcctctggagagtgtttacacctccagctacgagtacttattgtggttcaggtggagggtggttccctctgacgatctccccaggacacacacgagctttctgccattctccctggcaggactggcctgcttggcacaggaagtctctgcagataaggcggtctgcagtgacctgaaagctcagtggctcagaggaagctaacctctagcattccccagccacagagcacccctgtgggtaggacccacagagcctggcattacagggaccagacagcacggtgcatactctgaccagggattctgaggtcttgggccatttataccatggagataacgaagcttactcttaggcgggctgctaggagggcccaaagtcccaaaccctgatctaaaaagccagaatacccctgggttcaaatcctggctccacggcctgcagtgtgacctgggctaagttgcttaagttttcacaattaaatttaaaatgcatggccgggcacagtggctcacacctgtaatcccagcactttgggaagcccaggcaggcggatcacttgaggtcaggagttcgagaccagccggaccaacatggtgaaaccccatctctactacaaaaaaaaaaaaaaaaattagctgggcatggtggcacgcacctgtaatcccagctactcaggaggctgaggctgcagtaagccaagatcgtgtcattgcactccagcctgggcaacatgacagaaactctgtctttaaaaaaaaaaaatattaaaatgcacatggtgacctatctcattgacgctaaggcgtactctcactttatcatctctaatgtgaggctgcgccttaaaatcagcagtatgtcggaatgcagtgggcagagggccttctttttagtaatccataaagtaatggcatagctaacactaatcaatcgtgtcttaggtttgatgaaatacggacgtatctacctcaaaacaatggttgaggctcagaacagaacctgacacagaatacgccctcaggtatcggtgttggctgcttgtgactgactttggcaagtaagatcagtacccggcacctctgggcacacagggcccgggctgcatccactgtgccagggacctggtgccgggctgggcagcaagtcagtatcacatcagcaggcgtgggccgtggtgagcctctccctgccctcccgctggaatagaaagctgatcccgacgtcccactccgacccacggtcaggaagccgtcctgtccaggaaggtggctgaggtacatccctgaacacagtaggccacagcatcatgcagcggagggccagtggccgctattcttcctgctggtgttccactcggcccgcagctcacagcaagtctatgcggaactgtgcaacccacatgctttgattttcagaaatgttcttagatcctgaaccagaatgtgctgcaggggggactgtttcacctcaaaaattacagcaaagtaaatgtccttgtttcaacttttccaatgtttaacttgtaacaatagctacaaaagtaatcaggcagcaatgtgtttctttaaacggctttcctgtgagtgttccgtttacaaagaaaatcctaaaaccaggaagtaattggtgactttggaaacagcaagcaaacttcggtgaagaaagaggggcaggtgtacctggaaggactaacttgcagccactcatttcctttggagggcggtggggcctgcaccctgcagattagggtatattctgactcagcaaaataggcaccagcgcctgtaaaaagaaaccgcgctgggcactaagagaattctcaaaaactcccagagccctgggtgtgtgtcctcccacagggaatctcgcacgagttcgtcaaatggctggtctcaggttacacaaccagcactgcctccaccgccaccgccccccaacctcactggtccgagcggttccccgcggtctagccgcgagggcggggccggggggcggaggccagggcgggaccaaggctgggggcggggccaggcatggctgccgctcgccggccgggggcggggccgacggtcacgtgtgtacacagggcccgggcggcgtgcgcgccgtgagccccgccgcctccgccagcccgagctgcccgcccggcggcgactgcgccggccgccgcccagcaagccggtgagtggggcccgggagcctgggtcgggtcggtggggcacaccccagtctccgcctggggagggagccagccccaagctgctgtggctcccacggcgggcgctgcgcttactgggacccgggtcctctggccgctgcccactgcggggctccgtgcccttgccaggaggggaccgctgtcctccggccgcgctccgagctgagccccgggggcgggctttcggtcattaacctggtgatggcagctgaatctgctgctggcgtaggcggcacagcgccgccaccggctctcccatgtccgacagggcaccactgatcctgctctcctgggccactatggtgactgctttcggccccttctgtgattagtattttaaagtgagttttggatctgtgtctacatggaggtgtcggatctgctgtcagttgtcttggacagttggcagggcatgggacggctctttcaaagcttcactggaaggcagtgctctccagccgccaaaccaccactaccagcagcagaaaacccactattaagttagtattacaaacctggcaagtcagttctctaaattaggcataagtctatgaatcttgatgtgactggtcacagtggcttatctctgcatgcatgctacgtggtggaccagaggataattctgtattcgtcgtccacagcctttgatctcttccctgcccatgaagatgtacttgagtcctccattccactttaaatagccagctcctgtccacacggaacagcacgacatcttttatcttttgctacctgcagcacctagcagaggccagcattcaataacagagggccaagaggcttgctttaaaggcctctgcaaacttgtatgagtaaaatggttctgaccatgttcccaggctcctcacgcatagtggtgatgagatagtctaccgtcctaactggggcaccgttgagagtgaacggaggcactgttaataattagacgaagtgcacactcacagtacccatgacctgctgtgcagctccttcaagaactactgtaaggcctggctccccaaccagaacccctgttgtcttcctcaatgaagaaggcctctgaagacaagtgacttaagaacatagtttatatgtattgaatactgttgtgccttttcacagagaagaggtcggggccagagcagctcactgcccgacgccacacacatccgtgctggcgtccacgtgtcatcctgcctctctagccagcatggacatatcctgaggatggaggacagaggaacacagatttagggcagaatgtaaatgtgaaagttgacttggagtccctgcaactcataagccccagtaggctgatgaagagagaagggcaaagggcgcgcacctcatgtgggtcttaggttaggatgtaaaggctgattatgtctatcatacaatgaatcaatggcatactgcacagatcgctgcatggggaaatatgctcgtgtaatttacagtcggaagagggacatgctgctcactggggcagggagaagaaggggctcctcagggagctgcagctctcacagcccctaggatgtcacctggaatcctgaaaaaataactgccgcctggcctttaatgacccaaccacagcgaggtcttgcctttgcagaaggaaattatcacccagagaacccggccgaccgtgtcatgcacacgacgatcccacggtgctgttttctgtcaacagtgtttcccagccattccctcctgcctgccagctcctctgctctccagggctttcactaacccacctgcccaactgaccagcattaggctgtccagttagcccacatctgtccaggggtctcaaaggctcaggaccccaagacaccatccaggtagccaagaggacagggaacccagtctggagagtagaataacgtttcgctccaatttgagatcccaaaatgagatgctgcccgggaccagaagtcagtttcttaggagcgtgctgtctacccaggagcctccgtgtgcaaacaaaatacccccttgagcagcagagggacaaggtggaggtggggcaggtgtctgttcatccccacagagccacacccaggtcccttcctgcaaaggccaaggactttccccattttaattggaaccaaagcaagccttgcagaccactgtcgctaccacagctagtgtgatgaggagaaataacctgctggctcctccctgggaaacaaccaaggtggtgataagatctgcggctcagagcacttccctgcaggttaaggccacgcctagtaaaccggggctcgactgaggagccccggcaggtgccaagcctgcccagagtctgcagtagagactctctgttcttggccatgtctttgaatttctgaggaagtcttttttgtttgtttttgtttttccctggtctgatgtacctggagagggaattagcctcacacccagttagggaacaaaaagccaagtaaacaaaagaatgctgttccaccttcctccagggaactggcgcccatagctgcaggcacaggtgcccagcccgctcactggcccagcaaggtgcttggtctcaggcccccagagcccgtcctggagccgcaaacatgctcgctattatccatggaaaaagagaggcattctctttgtttatagtctaagccaagtcacctgattcactctcactactctgcagtttggaattgtaaaaagcaaaaggctacaaaaatcaaaaccatccacctatgtaatgaaccatttcttatcacagcccaggaaggcacagataggaatcagtgtgcgtaagctctccacgtggaaaccctgtgaaaacagcagcctttcctaagcatctggctcctaggagctggatgttaattgttgctaaagcctgggttcattactacaaaagaaaataaacattccagagtcattttgaaagcattttgattgttctagaatattcacccaaggttgagcgtctcatggtgcatggcaggttcggccaggagctggccgtggcctttccactcctttcctgccatcctgaggatgcagtgcctggggcctcgcagttctctttccactcaaatctaaggctctaaagcttcaacaactgtccggggacaataagaagcgctgagtccccatcctgcctgctctcctttctactcagtggggaaattggatcactcgccttggtggatcactcgccttggggaaaagccttttacgtcactgaatacatccccttctacggttttcatccaacagtcagccaggctgctgcagcacacataaaaacttcccctgcctgcaaagagctccaagtaggtgggaaagagatggatgtgcggacaggcttaacccagcaaagactggcggaggggtgtggagacagtggtcaggggtgggttcccgggggtactgatgcccaaaataaaatgtcaaggacgagccagtgtttgctgagagaacgaggggaagcgagaaagggtgttctaggcaagggatcaacatccgcaaaagacagtgtgaaagagagcacccggaaacttcgtggggatcaccgggcgtgggacttgccggccccagctctgacagggccctaagcaacagaggaaagaacttcccgactaacagggacagcaacatcaaaagcgatggcttttgtgaaactaattcagccaccttggagcagaggattcctctgctggtttctgtttctgccagctctgtgcagtgcaggcgctatgatgctctctctctctcacacacacatacagggacccgggtgcctctcaggttgagaggggtggtcaccatccccacactcaggccccctctgtctccaggcctgctgcttctgaacaggcctggggcagtccatttctattgggaaaccctatcaaagttagccccgggtttcagccaagttcacctcactgctcacagacattcattattaacagactgtttgatagcactttgggctctttttaaataagacataggaagaaagatgccaacgtctcacttgaaatgctcctgacagctagcctgacggggtcctgtcgcccctgtccacaccctgctatggccatggtctccacagccgcacatgggctccagacattttcacgagttatgaaccaaagagaaccaagacccctggagcaggttctccttctcagtcccatgttcctttgaaagcaatgaatagaggccagggaagcaagtgtttatactccagtttagtactagtgaaacatcgggaaattcattgtgttggtatcaaagccccaactcagaacataaaaaccataaaactgcaaagcctctgcagtctgagcgtgcgctccccaggcctccgctgtctgagcgtgcgctccccaggcctccgcggtctgaccctgtgctacccatgcaagcgccacccacaggtgcgtcctgggggctgcctcctcctccacgttggccagcagtgtggggtgtgacggggcccatgttgttgtcacccccaccctgccccacgtttcccctgcacacgtgtccgttcacaaagattctgagcaaaaggtcacagaacagcttcctctgccctttatatgtggggaggaggccaaagatctgcaggcgtcatcattccaggccagggctggtaacagggagcaagtgccggcaccctcttgtgcttcacatgggttggtttacttaaccctcctgtctcatgaagatttttactaagcctggggaaaccgaggcacacagcaaggatgtcacctgcctgcaaaggcacctgtgtgcaagccaggactggaaaagctcagcctgcagtgcacatgcttgctgcccgctccagagcccaggcccttaaccacttccttcctaggaagacggagggcgagggagtttcttacagcgctttatgtcaactcctgctgctgcccaccactaatccaggcccctgcagacagcagggcacggtccttcctattagcaggcttactacgaagccctgtctaacattccctcatgtcaggtagaaggaattagaccagaggtcaaggcagcggctggaatcagtggtgctttctcaaagtaggaaaacagttttaggactgttttcggtcaaattttgggcaccactgtactgggttctatgacagagaagccaccaaggtcccgtgcgaggagccctgggcagggacagctgaagctgtgcacctgggccctcctgattgcctcccaccagccaggcctggcagcagccagcagccaccccaccccaccccaacaaggagagctgccccacactgtcggcccccaaagctcaggacacacgggccctcccaggtctctctggcgggctaggccttggcagggccccctcagcgggccccactctgaaccgcaagcacagggtcttctgcagtgtgagacctgctgtcagcacaggcctacgggctcagggctgtgcagggacacaggggccagcaccactgggcaccctgtcctttcccagcctgcctgtgcaccctgtgggcagtgactcctcaggcacagtggcccaaagtcacaggtggtctgtcaggggctctccagggagctgcacacactcaggtttagatcaggaacagaacagatccccagggcatttgctcaggctcagagcagagcagggagccgtccacctgcggcgggcacatccatggacttccaagccaacagggacagctgcccagacgggctgcccaagccaaccaaggatcctgtcccatcggtccctgtggcttgggagtctggcactttttggctttcgtttctcaagctgccccagcttctccaagtcctgagcctggggctcccagctccgagcggatgctctgcaagtggcgtccctgcaccctggtgcaggcggacggacgcgggagagcctgcaaggaagtaaggcccagcagccttcccgggcttggaacgccgcagcctaggaagcatcttcccaggaaatcgcagtcggagcccagcacggggtcttggaagaaaagaccccaccttctatcctcacgagtacgcattaggagtgagcaccgctcagtagatgacacagaggcacagctgaggacccagagacgggcacaccggaaacagcgacatccacaggcgctcggcagggaccaggaacccagaaggcttgacgcgcagggggtctcggagaaactctacccctgtccttcccagcctcctgcttagctgggcctcaccctagcctgctggagatggcggccatgccgtcagagagggggatggacagattggctgaggtcaccccacaggccagcagaggcctgggtgggagtgcgcagccccgcagatggctgcttatggggcccagaggccacccctgcgtcgcagagggcaccagcacacccggacttctcggaggcttcatacagctcccaggccctacaagcagcgtgtgggcagaggcccaggccccttcctgtcactcagagaagctgctgctcccagaaaacggggcgccagcctcccatgaacactgtgtcccaaccccggtcctctcaggattcctgtgtggaaatgtcacttctgtctcagctctctagggtgcacctggtgtccagctctgccccctttctgcttaagcagctgctgggagaccctgagccaggccgccgaggttctgagctcgtaaggggtgcagcagtttcccgcacagcgtggggagcacatttgctcacgtctcccaggctggctgtacactctgaggccagccctgggctctgacactctcccgattccgctgggctttctaagccctcctctcctgtccactgctggcccatggcccaggcccagccttgaagctgtaaagacctctcaccccatccaaatgagactggtcagatatctcccgcatgtcagccgccactggattgggaaggacgggcagtaggtgcaaggctggccctttttatgagagttatttaaaaaacaaaaacaggtcaggcacagtggctcacacctgtaatcccagcactttgggagactgaggcaggagggtcacttgaacccaggagtttgagactagcctgggcaacatagtgagaccctgtctcaaaaaacgttaaatgaaaacattagccagctgtagtggcacatgcctgtagtcccagcttcttgggaggctgagatgggaggatcgcttgagcccaggaggcagagggtgcagttagctatgatggtaccactgccctccagcctgggtgactgagagagatcctggctccaaacagaaaaataaaaacagaaggaggaacagatgaatcccatttgtgacattaatgaattctcttatagggaaaataaaacgattgaaactgggccatcttggacagctgaggcccaggcagggccagctccttccaccttcccagccaagatgctgcctgcagcccctcccctcctggcccgagatgctgtcattgtccctaagagaccctgaggcctgctccaggctgagtgggtgaggagcctctgagcaggcgcctgcgtcgaggcgtgccctcctgagaggcaaggctgacctgcagcgtccagctcggctggggacactcgcctgagaagagcccagtcctgggtgcctccctaggggagggccttggggctgcttgtgctggcaccgacgtgggcctggggagggacctgtgtgtgggtggcaggtcttgaggagtcgtgggggagggtttcggggggagatgctggtggtaacagtgggaggtaggcagtgaaaccagcagtgtgactttggaggtgctggaggagcagggcctggcggaagaagtgggggagccaggaaggagcagctgccagggacggcctggcctgggagggtggccaggaactgggggagaagctggtggtcaagctggtggtctctcagtgcaagggtggggctggcctggaggagaggcccacagggtccctgctggctgagggtgcagtggcgggccccggaagctgaatatcacccccgccaccgggcaggcagtgctcagagtgaaacgggtgactggagggcatgtgccagctctgttcctcaagcctggcccaagagggacctgcagcatggggttggggggcaggcggcccttctctgtggtctctcctgccttctgagggagcctccagaatctttcatcgccgccacaacaaactcaggctttcgtgtaggaaaagagcccacttctgaagaggctcatctgggctttctctcccagcctctaagtctcccatcacctggctccccgttcctctttcccttgaaggaagtcagcagagtgcatggctgacgggaaagaaggcacagcgggcctgcccagtggggggagaagccaggccattgttctccagttccaggatgccctgcttccccagacagcccggcagccaggaaaaggaagtctctgggcacagaggcaagcgggagaccacggacaggcaaggagtcgaaggctccacccgcctgggccaggccaggctcccacagaacccctctgcgtccaggcaggcacatggggcccaggccatccccctcactcggacgcaggtgtggcgacggcgggggaggggcgtccacagtagagcccagaaccttgcgcaggacaggaccccggctaatgtgcccggaacagctcagtgacagggagctgggttggctgtgagggtcgggcacgcgtcacgagtctcctgtgaccaggagaggtgggaacactggctcacatgactcgccaggccctggcacgctgtggttctgtgggtgccccctgcagctcccagccttcaaaatgtacacctcgctgggcatggtggctcacgtctgtaatcccagcactttgggaggccgaggtgggcggatcacctgaggtcgggagttcgagatcagcctggccaacatggagaaaccttgtctctactgaaaatacaaaattagctgggtgtggtggcagtcgcctgtaatcccagctattcgggaggctgaggcaggagaatcgcttgaacccgggaggcggaggttgcagtgagctgagatcgtgccactgcactccagcctgggcaacagagcgagactccatctcaaaaaaacaaaaacaaaaccaaaaaaccatacacttcatgctcacttctctgggagccatggctaacagcctgcaggcaggagactctcaaaccagctcctggagggcactcccagggaccctgttcctaccacgagccagagaggaggcgggtcaaggagacttgtccacccaggcgtggccgaggaaggggtttcctcacgctctgctgacctgccttccttccatgcctctcagcccagctcctgacaaaggcgggaacctgagctcctcggctttaggaacgtcccccagagcccacggagcagcccgccccagctgccttccctcccaagatctccaggtaatgcctggtaaaaggagggctccagggagaatgttggggccaacacgcaaagcgcgtcaccttccaaccggcggagagtgaaggaaaacaggtacggctcggcttgtaaccttcactggaaacagaaaccatcctcatcattgatacctggtgaactgcacagagagcaacctgcagctttggaagtttataaatccttcagtatttgtcagctgccagtaaacaaaaatgcacacaggagaactttccacctgaaccccacctggaggccggcgttcccaggtcccggctggggtgacagcacgcactcgagagccggttcagggcgagtgggacgcacgtgagcgcagggaggaaatgccagcagatcccactccacgtgaccgcctcccaagaatcgagccattcttagccctgcagacgctggctgcctccctctgacttggcctcacggcggggcaggcattagcagtccaggcagcttctctctgactccctgcaaggaggggtgcggcgggcaagaggctggccccacgcggttccacctgcaggagagccctcgcaggaggctccgtgtgtggggccggctcagcttttctctggccatgcccatgtcccttctgtgcacggagacaccagatgcacgtgctcccctctctgcttccgacctgaacctgccctcggcctccgctgtgcctctgaggactcctgtgtcctgtgggctgagtgagcatggccaggccttcgctcgacagtagacccttctgttgatttcctcacggaaaaaagggttcgtaaccaacatctcaagcacactgaacaccaggggcggctgcatggacctggacacgtgtctgcctgacctgcccccaggctctcggtgggatgccccgcagcgatgcagacaggggcctgcgggcagaggccacggcctccatgagccaggctatcagaaaggtgggacaagaggccagctgtgctcagtttgcagtgcggtcccgtccaagcacggcccctcgtttctggaacccggctgtaaacagcaggagggaggggcggtggcgcctgccaagggaggcagaggccctgcggggaacttaccagaggaaaacaagtgcttgcatcctggggccctcacacgcacgcgcaggcggccaggcgcgctgctgataagagcctgcgggtttgcagagaagcgcagcagcgcgcaggtcctcaccagagctctggtggccacctctgtcccgccatgctgctcaccgacagtggccagggcccacagcaccaagaggcttgggccacaaagtaaaggtgagagcctgtggtgcccgcaggtgggagaggggacgtggggggctctgtgcagtacaggcaggagaggggacgtgggggactctgtgcagcacaggtgggagagaggacgcagggggttctgtacagtgccaccggtggacatctctaagtagggaatgaaggggtgccgagacagagcacactgaggggtcccggcccttggcaagctctgtggggtgaaggtggccggccgggtgtgccctcctgtcagtgactggaggcagcacacaaggcacacagtgagacagccctcccgctccgatcttctaatcacagaccctggacagatccgggggccctgggcgccccgtgaggccaggccaggctgctgactgacacccagtcacagtggcctgtgtttcctggggactcaagtggagtctggggggtgacgtccccaaactgggctgccactctgtgacagccaaagccacgcagcctcgcaggcagaagctggggtgtggaggaccacgatcctgaagaaccccgtcctctggaccctggcgcagcaggaggggagaagcccgcagaggcccggacgcccccctcaccggcccccgccactgtgcttggagcaggtgcatcctgtctggagcttgtgctggcccggcgagtggagcccagagcccatcccccactaccaacatcccccagattgctgcctgcctggccgaggaggtgctggtcaagatgtgttagtgaggagctagacaagatgagcacgtgagaagcaggggccagggagcctggacccaggacctgggggtgctgtggcagcgctgtggcggcactgtggctgggcacacccagcagcggcctagctctgcatgcctgtcaccacctgaccctcactgcggctgctgggcggcattcaccaggattgcacaatgacccacacctcccgtcctgcccaccagcctctggatgggaattcccacatctacccacccgcccatctgccagctgcctgcatgcctagccacagggccgtgtctcctgctgtggggcgcacactgctattggcactggggacctcgggccctggcccctccgtgctctccacctcccgagcctcctcttcccgccctgctgtggccctgtgtgtggtgtgggtcttgcagtggcaggactccagtggcgggtgaggacccactcccgcagccggcctcctcactgctcttgcctccgggcatgggaacgatgccgtctgctcgtctgcctgagacgctttctactccactccgagagtaggaggtcagccggggccaaatgacatggtggacatcaggcttcccgagatagctgtaggtccctgaggaatgcctgtgctttggcggggtgggggggtgggggtggcgaaattcttactctaggatggctccagccgccaggttctcattcagtgacgtcaagactggctatgtccccatgtccccagagcctcctgtgggctgcgacccacaggtcaccctccctggagcccaggctctgcaaggactccaaggcaccgggtcctgagctgccgggagggagggagggaggctcagggctgaccgtccacattgcctgtccctcccggcgctggcaagatgcgaacaccacagacatctagtaaacttcgggaatcactgtgcggggcccgtccaaccaactcaggacgaccacccaggcctcgcagcagcccgtgaagagtgggctctgagaatgtggggcacaccaggctccctctctggtccccaaccccagccgctgaaataagtgcagccacagcagcccccggtcacgacccgagacggccatttttcaacgctcaacttcactttcacagaaatgcaccaaaggcagcctcgctctgtggtctgcagcgattactgcaccaggagaaggcacccctgtacctgcagcacttctgggccagggctttgggacgggacgcgagctgaccacctgttccttctttccgcagggtcgcggagcctcgccggccgccatgtggagctgcagctggttcaacggcacagggctggtggaggagctgcctgcctgccaggacctgcagctggggctgtcactgttgtcgctgctgggcctggtggtgggcgtgccagtgggcctgtgctacaacgccctgctggtgctggccaacctacacagcaaggccagcatgaccatgccggacgtgtactttgtcaacatggcagtggcaggcctggtgctcagcgccctggcccctgtgcacctgctcggccccccgagctcccggtgggcgctgtggagtgtgggcggcgaagtccacgtggcactgcagatccccttcaatgtgtcctcactggtggccatgtactccaccgccctgctgagcctcgaccactacatcgagcgtgcactgccgcggacctacatggccagcgtgtacaacacgcggcacgtgtgcggcttcgtgtggggtggcgcgctgctgaccagcttctcctcgctgctcttctacatctgcagccatgtgtccacccgcgcgctagagtgcgccaagatgcagaacgcagaagctgccgacgccacgctggtgttcatcggctacgtggtgccagcactggccaccctctacgcgctggtgctactctcccgcgtccgcagggaggacacgcccctggaccgggacacgggccggctggagccctcggcacacaggctgctggtggccaccgtgtgcacgcagtttgggctctggacgccacactatctgatcctgctggggcacacggtcatcatctcgcgagggaagcccgtggacgcacactacctggggctactgcactttgtgaaggatttctccaaactcctggccttctccagcagctttgtgacaccacttctctaccgctacatgaaccagagcttccccagcaagctccaacggctgatgaaaaagctgccctgcggggaccggcactgctccccggaccacatgggggtgcagcaggtgctggcgtaggcggcccagccctcctggggagacgtgactctggtggacgcagagcacttagttaccctggacgctccccacatccttccagaaggagacgagctgctggaagagaagcaggaggggtgtttttcttgaagtttcctttttcccacaaatgccactcttgggccaaggctgtggtccccgtggctggcatctggcttgagtctccccgaggcctgtgcgtctcccaaacacgcagctcaaggtccacatccgcaaaagcctcctcgccttcagcctcctcagcattcagtttgtcaatgaagtgatgaaagcttagagccagtatttatactttgtggttaaaatacttgattcccccttgtttgttttacaaaaacagatgtttcctagaaaaatgacaaatagtaaaatgaacaaaaccctacgaaagaatggcaacagccagggtggccgggccctgccagtgggcggcgtgtgctagcaaggcctgccgggtgtgccgcagtcaccacagggttctgagaacatttcacagaagtgcctgagacgcggagacatggctggtgttaaatggagctattcaatagcagtgacgcgctctcctcagccaccaaatgtccctgacaccctccccagcccccacagataacatcagctgaggtttttttcagtatgaacctgtcctaaatcaattcctcaaagtgtgcacaaaactaaagaatataaataaacaaaagaaaggtgtgttaggatttctgactgaataccagagctgaagggcccccaggggacagagggctggaggctgtgtcacacggggtctggtgggagggccagggtggaaccttaggccagctccgaaggcacctgggaccagcatccgtatctccgcggccctcgcagcctcagatggggcccggaccggcctgttccacttgagcgaacaggtctgcagtgaggagggtccatagtggggcgggtccgtagtggggcgggtctgtagtgaggcgggtcttagtgaggtgggtcttagtggggcgggtcggtagtgaggcggttcctagtgaggcgggtcccgagtggggcgggtcagtaggtggttcttagtggggcgggtcttagtgaggcaggtcttaggggggcgggtccatagtgaggcgggtccgtagtggggcgggtctgtagtgaggtgggtcttagcggggcgggtcttaggggggcgggtccgtagtgaggcaggtcttagtggggcgggtccgtaatgaggcgggtcttaggcaggcccgtagtggggcgggtctgtagtggggcgggtctgtagtgaggcgggtccgtagtggggcgggtctgtagtggggcgggtccgtagtgaggcgggtcttagtgaggcgggtcttagtgaggcaggtcttagtggggcgggtccgtaatgaggcgggtcttaggcgggcccgtagtggggcgggtcttagtggggcgggtctgtagtggggcgggtccgtagtgaagcgggtccgtagtgaggcgggtcttagtgaggcgggtctatagtcaggggcaattgttcctcgtcagcctggctggagaccttccacccattgggattttgtaaaacatctactttaaaatgtggccgtgagaaaagcccccattcctccccaccatctgttcgcctctccccgattttctaggattaaagtataggcctgcaatcccctacctccaattctaaagcccacaaagctctgaaaacaggaagatgttccccccaagtttgcggcaaattcactgggcagcgatccctgacctgaaggggtgtgagagcttcatgtccatgaggaccccaccccttctgaagacgggcgatgtggctgtgggagctgccctgagcgccccggggttctgtggcacacttcctccccacagcctgaacgcgctggaattctgagtatgcccggccccagggacagtgggggtagggtggggggagtggcaccttgcagccatcgacgtggggacgtcacgctctggtcccagtctcctgggaattcagccacgaggtcactggcattattcatcacgtgctgcaagcaggtcagagtcggcctcgtgaggacgcggctctgggtggctcctgcggggagctcagacccgcgggacaggctcctaagccgtgggattagagaacagttttctgagctgtttctgtcagtgtttggttttcaggtgtgaacctttaaagccgcaggcctgacctccctcccagtccctctggagccggagctggtgtaagggccgcgtctctgatggtcctgggcttcccatctccatgcctgcgcggaaaccctggcatccgatgaggaagtgatcacacaagcccacagaaccctgcccagcggctggcgccgtcagcccaaccctcctacccctgcagcccagctctgcagggtggggtgtccgtgcttgaaccaggagaccctcttcctggccgatactttccagccccccttggctccacgctgagctcccaggaaaggggcggaccccacacacaggtgagggtggcactgggctgcctctgcccgggaattacaccatccaactatcctccccaaaggcaggaggggcctaaaatcactatttcaatttctcagtggctttgggtgcaaactggctcatttctgtgggtctgttgcagggactggcctgcattcaatacccctcatcccaccctgctgggtggccctgtggagggccccagggacaccctgctgcctggtcagctgtttgttcctggtgggccccacacagggcaggcacatgcctccagcgcagaccctcgcctgctacctgagacacttcactgtgcaccatggcctgccccaaccccctacccagcgagtcccctcctcatccccaggttcccgccagcctctgctgcctgagaccctccactgagcgccaaggcctccgtcctcatccccaggctcccgccagtctctgtggctgcttcccaggagctgcgtcgctgactgttcctgagacacctgctcatctatattctatgttgccttcacctgggaagattcggcacctcctgagcctcctgccgcccctgagagattcccaaagccttcacctcatcacacacagaacacaagaacttgagccactcggggcagaaaaaggagctacttgtaaaaagtcaaggtagtcatctgcccaactccccagttcttccaggcagccgtctccccaactccccaattcttccaggcagccatctccccgactccccaattcttccaggcagccatctccccaactccccaattcttccaagcagccatctccccgactccccaattcttccaggcagccatctccccaactccccaattcttccaagcagccgtctccccgactccctagttcttccaggcagccatctctccaactgcttaattcttccaggcagccgtctgcccaactccccaattcttccccagtttgtgagacaccaggatgcgagtttttcagcgcgtgacgtcccagggtcaatgatattgctaccaacacttcttgactactatagttcaaaaatcattcatcttatttttgtttatccacaaaaaaaccttgccctgcttccttaagtaagattccagaaagggagtttagttgtagattcacttcattaaagttctaagagttattgtaggaagctggatctagtgtgaattgtggcgaagagatcaggaaatctacacacgtcttctttcatacacagcacacgacagagggaaagcaggaatagtaaccgtaacagaaagtatcataaaattggttatttcccctcgaattgtacgtcttaatactttcggttacccctctgtagttcctctttgcagaaattctgtccacccaatcacccaggagtggttccacttcacacacgcccggcacgcaaaccatgtctccacacgtctcaaacggtagcagagggagtaccttggctgctggcgaaggagtaagccacgcgggctgaaggagcaggcctgccccacacaggcgttactcctcccagaaaaataagaataaagtcaccattgactacacccctgagggcttctgtggccctgaggatggaactgaggtgttggggtatcctgcagccctcccaaggattccggcagaagtgagagcacacgttcctgcctccgccctgctgcacagggcagcctggcaagagctgtatggcggtgcgcacggtccgcactccgtcaggttgggaagtgaaggaagagcagagaatctaggcaggaagcataacgtgaacatgcccatttcacatgtacccctactcctacccctaacccctaactctaaccaacttaaacctcacctaaacaccctattcctaaccccctaaccaccctaaccctaaccctcaacaccctcatctgaaccctaacccttacagaatcgctctgggcctgcctggctttgccaagcctgagcgtgtgagtgcatctgacctgccccctccgttctctctgggctcctccatcctgtgtcttctggcatcgctcacagacccacgccccatcctgctcagccaccttgactcgctgggggaccacaagatgaacacagctctgacactgccagctgaccccggccacatctggggcttccacgcgacgctgtccccaaacagcaaatctttgggtacagatgggaggtgtcctgaggctgggacaaggactgggcaggggctggcagccggtctggcaacataagcaagcccctggctttccctctgctcactgccttggctctcttcctcactctgtgactgatcgggtgctcctgagaaacgggctccctgtgctgctcctggggtgtgcgtcattttcccgtgtcccgtgtcctacgggttccaggcactacaattcactggtccactctgctgctgacaaacatggggactgtttccaacttcaggcgttcgtgcacgaagcggcgctgttctgccgtgtctcccagcgcccaccatgggcccctgcgtggggcactcctcgggcagacacagcctcagccgcgcacgctcaccaagtgtggtctcacgtcctcacctgcccttggtgccatgtgtctctggtattttgtgccaagccaggggaggattaaggcatttcccatcttaatgacgtcttggcctctccaaagaagcgcctctttagggattctgcccacgtttctaagtgatgtaaggtccttcctggtttgatctgaatgtgggcccttgccacggctccttaatctaactgtacccctgtacctgtgctgttctctttccacagaagggcgagctctaccacaccacagagaagtcagagctccgcaagtccccacctggaagatggaagacccctcagaaacagcctgttcttccctctgcagaggtggggggcagggggactagccacactcaaaactggcagcctctgaggggagggagtcacttcaacatctcgaactttagacagatgtgtgtgcctcaggcagcatacacacacacatacatgcgtgcaagcatgcacacatatgcaagcacgcatgcacacacacaaacacacacgtctgtctcctccccgggaacaccgtgaccggaagaggcttcacacgcgtcggctgcagggtaggagacccgacacagcgccgggtcctgatgggctgtgacgtgaagatggggagaccaggcccttagcagccacagaacaggccccggaaagacgcacgatggctccactcttggaagcagatggtggctctgtagggagacaaggcttaccttgctccagggactctgaggagacgctgtgcagggaggctgcccccagcaggagacatggaaggtgagggcagaaggaacagcggtggggagcaggggcactgacaggttccagaccctgaccctgagcttcccacagcgcctaaacgcaacaccctgactcctgagaggaagggagggaatcccgagctgacctcacacaggagaaccgaagctcaaagctcaagtgtcaccctgaaaggcaccggcagacaaaggctgagtctccagagccagccctgcatccacccaaactagcgtggtgcagggactcctccctcggccgagtcacctggccccagactgtcggatgtggggccagcagggaccctgggggacgccccatggacacgagggagactgaagcccagagggtcccacagcagtgagcagcccctgctgccaggctccagggctccagaagccccagcccaccccacactcagggcgcacagaaggccccaggagggagggtgggaaacgccgggtcaagcgagcagcatccgattcttttctgcaggacatctgagctgtgccacacacactaaggcttctaaagagaaaagacagcgttccccgctgtccaaccctaatcatcacaggacgctttctgcagagccccttggggcacgaagattcttcccagcaccagtctgagaaacgatgaggccctgggcaggaggaaacatggccccatcctgttctaggggccacggcaccccttggggcccctctccagacccaaggctggacaggctggcttcctgcccagctccagccaactggcatacactaagtgtgcagctgaggtggtgggaggaaggtaaaacgtaccccacttggcagccacttccaaaattaaacatggttaacatctgtccccgctgtcccaattccagacatttacccaagaaaaatgggaacggaagtccacacaagcacctgtatacaaatgttcacggcagctttgctcataagagcccaacactggaaacaacccaactgcacatcaacaggtggacagataaacagatgtggcctgcgcatcgaaggaatgctactcgtcagcgaaatggacccaccggggacaggcgcggcaacagggtgaacctcacaaaacatgcagctgcggggacacagctagatgtgagcacgtgcaaagtactggagcctcttcagcagctccagagcagggaacccacctcaccagcgacacagcggcgacgagggccgggtctgggagggcgtgggccagggaggggcgacggaggcggtctcccttgccggggtgctggtgacacagcggctgcacctgtcagaacacgccagggtggagacaggagatctgtgtgcttcccgagtacagatcacggctcagcatctcatgggaaagggacagggctctcttcaggacacgcagtaagatttcaagtgcgggcacttttaatactccgcgatccaaaggcagctccagggccagccgcggtttccggcctcaagggcaggctcggttctggagctccctccagtggccgtcggggtgccgtcactttcagggccccaccaggagagcaggggccccgccgaggaccagagcgcctggaccagagggagccctgcgcggccggcacggatgcctctcaataggcggcatggggccgacacgactcggtgagttcccgccacggctttcgccggcagccggcggctggaggacaaggagaatgcgccggttctgttcctggacaagctccatggcgctgcggggtcccggcccagaaagcccaccctcccccagaatttccccaggcccacagaaggggaccggaatgggaaaaataccgacaaacgcagcaacggtgcggccgtaggtgtctgcgcatccggcggggctcctacgggacccccacgccgcctggacgccgcctagcagatttggggccaggctaattggggcccatcgtggcccacagatgccagctccgggccatgctgagggacaggggagcggaggatactgcctgtttcccggcggggggccctgctcaacagcctttcccttccctacaaactgtcccaggatcccgggccattccttccagtaagttgggaagtccaggaccagacctcaacgtggaaaaagctggaggagagaaggggggacgaggggttctacctgccctctacctacctgccctcctacctgtctgtccacgggatgcccagaggctcccagaccaccagccccagacccttggtactgcgtccccagctgtctgccaggggcctgctggggaggccgatgcccatccctaagcctgagcctccagcccggcacgagggaaggccccacatgccccaaaggagagggttcggggcacaatcttcacaaaggctggagtgcaccccagaggtgagggtttggggcacagtctgttggcggaggcaggagtacaccccagaggtgagggtttggggcacagtctgttggcggaggctggagtgcacccagaggtgagggtttggggcacagtctgttggcggaggctggagtgcacccagaggtgagggtttggggcacagtctgttggcggaggctggagtacaccccagaggtgaggatttggggcagtctattggcagaagctggagtacatcccagaggtgagggtttggggcacagtctgttggcggaggcaggagtacaccccagaggtgtgggtttggggcacagtctgttggtggaggctggagtgcacccagaggtgagggtttggggcacaatcttcacacaggctggagtgcaccccagaagtgagggtttggggcacagtctgttggtggaggctggagtacacccagaggtgcgggtttggggcacagtctgttggaggctggaatacacccagaggtgagggtttggggcacagttttcacacaggctgcagtgcaccccagaggtgagggtttggggcacagtcttcacacaggctggagtgcaccccagaggtgagggtttggggcacagtctgttggtggaggctggagtacatccagaggtgcgggtttggggcacagtctgttggaggctggaatacacccagaggtgagggtttggggcacagtcttcacacaggctgcagtgcaccccagaggtgagggtttggggcacagtcttcacacaggctggagtgcaccccagaggtgagggtttggggcacagtctgttggtggaggctggagtacatccagaggtgcgggtttggggcacagtctgttggaggctggaatacacccagaggtgagggtttggggcacagtcttcacacaggctggagtgcatcccagaggtgagggtttggggcacagtcttcacacaggctggagtgcaccccagaggtgagggtttggggcacagtcttcacacaggctggagtgcaccccagaggtgagggtttggggcacagtcttcacacaggctggagtgcaccccagaggtgagggtttggggcacagttttcacacaggctggagtgcacaccagggaggcttcccgcctctggcagaatcaccgccatgctcagtcacaaacccagagctgcgtttggacgctgcagcacacgctgcggccccagcaacggtcctgcgcaccaggctcctctcccagtaaggtccgcttctctgtggagctcaggggtccctgcagtgcccaccttagcagagggcaaagccttgagacacggatgctttgtcctcaggtctccactggctcctcagaacagggcccctcagcgctgcagtgtgtcacatgtccccagtttcccctcgtggtgctcacgccacacccctggcacggaggctggaacccaggtgtcagtcctggctctgaccatgaccttggacaaaccacccctcagacctagagccctcatgcacatccccatggtcactgccacccggcagggagcaggacagccccgggggtctgtgactgtccccgggacatcagtctgagaaacagcgctgagttggacgctgcctggtgtggacactcgccctccacagtcacacaaactcggctttgcaaaatcagttctcagtgaaggaaataatgtacacagtggtccacttccaagacacagtgtcttgcttgcttaggtcagcaagctacagaagaccaggcccctgcctgggttgccgatgcctgcttgtcggcctccccatccccagtcttccccccaacgcttagttgccttcacctgacccaaaaacttttagtctatgacgaaagttttactcgtctgcaacatagcttgttttgtctgttcttatcagtctgcccagctacttaggtcataagtcaaatacctgaaaagcccctgagctgactaggattgcaacgcattgtgggctgcaacaaaatgcagcaggacaaccctaaaaaaacacctacagcccctgcccgacaaccaataggtgatgtccgggaagactgtgaccccagagtactcagcctgtgaggaaccgggggaggggcctgcgtactgggggataaatggcttgttgtgaccgtgctgggtgtgcctgcccaccagacacccgatcttgcaagaccgtcattaaaagtctcacgtttaggccgggcgcggtggctcatgcctgtaatcccagcactttgggaggccgaggcgggcggatcacctgaggtctggagttcgagaccagctttaccacatggagaaaccccgtctgtactaaaaatacaaaattagctgggcgtggtggcacatgcctgtaatcccagctacgaagaaggctgaggcaggagaatcgcttgaacctgggaggcagaggttgcggtgagccaagattgcgccactgcactccagcctgggcgacagagcgaaactccgtctcaaaaaacaataaatagctctccctctcccctctcccctctcccctctcccctctccccacggtctccctctcatgcggagccgaagctggactgtactgctgccatctcggctcactgcaacctccctgcctgattctcctgcctcagcctgccgagtgcctgcgattgcaggcacgcgccgccacgcctgactggttttggtggagaccgggtttcgctgtgttggccgggccggtctccagcccctaaccgcgagtgatccgccaaccttggcctcccgaggtgccgggattgcagacggagtctcgttcactcagtgctcaatggtgcccaggctggagtgcagtggcgtgatctcggctcactacaacctacacctcccagccgcctgccttggcctcccaaagtgccgagattgcagcctctgcccggccgccaccccgtctgggaagtgaggagtgtctctgcctggccgcccatcgtctgggatgtgaggagcccctctgcctggctgcccagtctggaaagtgaggagcgtctccacccggccgccatcccatctaggaagtgaggagcgcctcttcccagccgccatcacatctaggaagtgaggagcgtctctgcccggctgcccatcgtctgagatgtggggagcgcctctgccccgccgccccatctgggatgtgaggagcgcctctgcccggcgagaccccgtctgggaggtgaggagcgtctctgcccggccgccccgtctgagaagtgaggagaccctctgcctggcaaccaccccgtctgagaagtgaggagcccctccgcccggcagctgccccgtctgagaagtgaggagcctctccgcccggcagccaccccatctgggaagtgaggagcgtctccgcccggcagccaccccgtccgggagggaggtggggggggtcagccccccgcccggccagccgccccatccgggagggaggtggggggtcagccccccgcctggccagccgtgccgtccgggagggaggtgggggggtcagccccccgcccggccagccgccccgtccgggaggtgaggggcgcctctgcccggccgcccctactgggaagtgaggagcccctctgcccggccagcacacatgcacgcacatacgcacacgggcacacgaatgcacgcgcacacatgcacacatgcatacacatacaccacgtgcacagggacacacgcacacacgtgcacacacgcaaacacgcacacacggacacgcacacacatgcacacatgcatgcacacacgcacacaacacgcacacggacacacatgcacacacatgcacgcacatacgcacacgtgcacgatacacatgcacacgcgagcacatgaacacgcacacgcgcacacatgcacgcacatatgcacacaacgcacgcagacatacacatgcacacgcacgcacacggacacgcacgtgcacacatgcacacacatccacacgtgcacacatatacacacaacgcgtgcacacggacatgcacacgggtgcgcacacgtgcacatgcacacacgtgcacacacatgcacgcacacacacagcacgcacagacacgcacacatgcacacacacacagcacagacacgcacacgggcacatgcacacgggcacacacacacgtgcacacgcacatgcacacacatgcacacacatgtacatgcagccccgaggcagtgccaccggagccagcctcatggagtagcctcctccagggtaacaggagccatgggggggccatgagactggattccactcatagaggccccgcacgcggctgttcaagcaaagccacactgacatttctggtatcaaatttaagtcaatcttttaatgaccctcccgcacgtcagcagcagatcaggtgcaatggcaagaaaagcaagcgagaaacagctgtacaacaacataggcttaaaaattctttttgaaagaaactttaataaacgatgcattggtgagtggtgaaaccggaaggtgctgtggccccgggctctgtggcactagcactggtagtctcaggtgcgctgagaggaccagagctccttggagaaaagctgatgtgaggtgggcctgggcactggtgggggcagctggggggctcccactggccacacaatacattaaaaaccacaaaaactgatgagtccacagcgacactccaaaaagcaggcaggagagggaggaaaggggagagggaggagaagtaccactgtgagtcttcatagaagccactgtttccacagaccctgggcaggaacaggttcaggagacgcaaaggcaccgggtgggaggggtcaggagggcaccgtcgccacaggacgcattgccagggaagtcctatgatgcacgcccacctcagtcaagtgaccacattcggtgtcaccagcatgggacaaggtggaatggcatgcctgcgggcgacaccacatacaacaggcagccttgcccctgtgggactcacccacctgagcggagccagcctaggacaccttagaaggagggcttcggcacccaagactgcacccccaggcccaggccgcacggccgcagcacaggctctgcacctggtcggcacacgtggggaggctgcaggacagagccaagcagctccgggcaagtggcacccaacagtcacccagccacacaggggaagagcggggaggggcccagcgctcaggatggaagagccctgggcaaggcatccatagacaccttagactctggcctaagcggggatccaagatggccttccgatacccagaccctcccatgcacacagagtgcccccacctccccatggtcctggagccgtaagcatcctggctgcccacggtcagcacacactgacccgcccacggtgcctctgctgcccttcttctctcgccactccccatctgcagcccgtgtgctgaggagggcacggaaaacgtccaaagcacgcacgactgcagcgaagctcatgaatgcccctgcacacacgcagtggggcagacaccggttggccctgccaggccctgcacactcacgggaccacgactgctcctcggatttccagggtcaaatggggtccagtcaaggaagggctgtgcgttctgcttctgcgcttaggcatatgattaaacacatttcataattagatatgatcattgcatctgagacacagagctttccaaaacggtctgtgggctgaagttactgcttccctaaacgtctgaggggcaacaccagtgccgccagctaggcctgcagccctccttgtagaaaggctttaattatggagtcaatttcttttctttcctttttttttttttttttttttttgagatggagtctcgctccatcgtgcccaggctagagtgcagtggcgcaatctcagctcactgcaacctccgccccctgggtgcaggtgattctcctgcctcagcctcccaagtagctaggattacaggcgtgcgccaccacgcctggctaatttttgtatttttagtagagatgggatttcaccatgttggccaggctggtcttgaactcctggcctcaagtgagccaccgcgcctggcctggagtcaatttctttaatcgttacaggactgacagagccttcaaaagttcttcttgggtcagtatggtaatctgtatcttaaaacaatgtgcccagtattggcataaagttgttacaacgttcccttactgtcattctgttgtctctagaaggatctgaaaatgtcctaggcccaccgaccaaaaccaggtcctgaaaaccaggactggcagcaggagaggaaggcgctcctctggcctctttctcacccactctgcagcttcacacacaggaacaccttacaccctccttcggtgtgaatttcaaaatacatacaatgaccagagggcagcggaagggaagggcagagagctttcaagcaacactgccctccctcctcacctcctcaccgcattccactcccgtttcggagacaagtggccggcagctactccccgcgcaggcagctcctccggcgccccagctgagctcccgccgcccctcaggctctgcttcccaccccctaatcccgctggaatctgccacagcatcgacctgctgctcctcaacatcgtagagctttcttactttctcacaactccttgagacactttttttactgtggtttccttccccagcccatatttggttctcatgaaaacagaagctccgtggagaaagcgaagaaagtccttgaaagtcgcctgttcaaagccgccactgccgtgatgccccctgactccgcaccccgccgccgtgacgccccccacgaccccgcaccctgctgcagtgacgcccccgacccctcaccccgctgccgtcacacaccccgaccccgctgccgtcactccccacgaccccccaccccgctgccgtcacgctccgtgacccccgaccccgacaccctgctgccgtgatgttcccccaaccctgcaccccgctgccgtgacgcccgccccgaccccgcaccccgctgctgtcacgcccccgaccccgcaccccgccgccgtcacgcccgacccctcaccccgctactgtgacgccccccgacccctcaccccgctgccgtcacacaccccgaccccgctgccgtcactcccaaccccccaccccgctgccgtcacgctccgtgacccccgaccccgacaccctgctgccgtgatgttcccccaaccctgcaccccgctgccgtgacgcccgccccgaccccgcaccccgctgccgtcacgcccccgaccccgcaccccgccgccgtcacgcccgacctctcaccccgctactgtgacgccccccgaccccgcaccccgccgccgtcactcccccgaccccgcaccccgctgccgtgacaccccccggcccccatcccgctgccatcacgcctcccggcccccgcacccttgtctgtgtcccacagcacaggacctgtcagcgagcgtctggcgccttcctccctcccctgcagagacccgccaggcccctccaacaggtgctttctaaactgcaatttcctcatctacaaaaggacaatcacaacaacggaacccaggggacaggactgcatcaactacaaccagacggcgtagacggcagcacacggccctcggcaaatcagaggtgctcagtgaccacagccaccatgacagcagggcggggcggggggcaaggaagcagcgctgggagacttggagacaccccaaaaaacgccttcctcagaaacactgctgtgcaagaacctgcaaatccctaaggcgtctgtgtccgatggccccggccccatgctctgaggtcgcgcaggtgtccaaggccaggaggggcaccgaggagacgaagaagaaacagcacagcagctggggaggtgaggcccgcgcctgggatgtcatgcagcctgccgagcagccgctcgagggacccgcccatgtgtcatcagctctggccttcctcctctcacagatcagagagcagagggcaaggtgggcagagcccagggtgggtgcagggctgagcgcaggacagacgtccctccagcctggtggctgccccgtgtggtgagcgggaggacgtgtgagctggggggctcctccttgtgactgcagatgtgtgggccatgggagggcgcagaatggaccaagaaccgaaaggtctgtgcaggggccctgcagcatcccaggagcagccttgccgccacctccatccaacacaacccgtcctctggcctcactgaattctcctgaggaccaaacacgggaggggtgtggttcctaggccatctgagcaatgacaagctagacgggtggttagaaacagccattttaggccaggggcggtggctcacgcctgtaatctcagcacttaggaaggccaaggtgggcggatcacaaggtaggagattgagaccagcctcttcaacatggtaaaatcctgtctctactaaacatacaaaaattagccggggaaaaatacaaaaattacaggcaggcgcctgtaatcccagctactggggaggctgaggcaggagaatcgcttgaactggggaggcagaggttgcagtgagccgagatcgcaccactgcactccaacctgggtgacacagctagattctgtctcaaaaaaaaaattaaaaaaaaaggaaaagaaacaaccgttttagggctcttgaagctgaccaaggccgcacaacaaatcgggtcacttttttttttttttttgagacagagtaggagtcttgctctgtcacccaggctggagtgcagtggcgcaatctcagctcactgcaagctccgcctcctgggttcacgccattgtccggcctcagcctcccgagtagctgggactacaggtgcccgccaccactcccagctaattttttgtatttttagtagagatggggtttcaccgtggtctcgatctcctgacctcgtgatccgcccacctcagcctcccaaagttctgggattacaggcatgagccagcgcgcccagcccgggtcacatttattaaaaaaaaaaaccctcctgacctcaggtaggaacagcagagtctgagtcaccaaagcccggggctgccactctccagggcgccccactcccagctccagcggctgagtccaccaagccaggacaggcccaaggaccagagggcgaggtgattcacagtggagctcggaaagacccatccatgcccagcgccttgtcaaaaaccacaggggtcttggtgacaagcaattgagggaggccaacatggcagagccagggctgcaaaatcggctggaataagcatcagacctgctagaagggtaagaagagcagtgcagtgtggtacatgccagggaggagcatcgccagggaggagcaccatgagggaggagcaccaccagggagaggcaggccagggaggagcaccgccaaggaggagcaggccagggaggagcaccaccagataggctgcaaggagcaccctttcctgagcctgcatgctgctccgcaggaggctggggagcacctccctcccaggcatgggctctggggaggagttcccctgtggcaccggtggtttcccatggatgtgccacgctggttttcggagcctgcaggcggactgggcaccgtgtaaagaggcccgagagggttcccctaacacaggcaagcgtcatgcacagggcacaagcaccggggagggatgtaagaaaggtctatgctttcagtttccaacagggctggccctgggaaaagccgcagagggaagctggctctgaattaatgtccaagatcttttcctccacttggcagggctctctcccttcagggaccggtggccttggccaggactcttcccagcccagcgccacagccttctcgggaaagccgggggaggagagcatggggacttgcacgccttgcctggctggggagaggacctgccttctagccacacttcctgcacagcccacgcccaacccctgggtgacgctcctggcacaggcttacggggtggtcagcgaggggctggcccctgctctgcagccaagactcaggttacccagtgtccagtccggagctcctgctgttctgggtaccctgctgttgcgggcagagggccgagacccccggcctgggccagatgccaatgctggctcttagctcgagactgtacgacagggtccgaggaaggcgctcttgggcttacaaaggcctgagcacttttccctggtattcttgggggctttcaggtcctatttttatttatttttatttttttgagatggagtctctctctgtcgcccaggctggagtgcagtggtgccatctaggctcaccgcaagctccgcctcccgggttcacaccattctcctgcctcagcctcccaagtagctgggactacaggcttccaccaccaagcctggctaattttttgtatttttagcagagatggggtttcaccgtgttagccaggatggtctctatctcctgaccttgtgatccgcccgcctcggcctcccagagtgctgggattacaggcgtgagccactgcacctggcctcaggtcctatttgaagttgctctggtcctcccagagtgctgggattacaggcgtgagccaccgcgcccggccccaggtcctatttgaagttgctctggcagggctgctttctgaacgtgcaagccctcaggtgccccgtgcacaggcacacaccaccttttccctctgcagtactaagctggctgcctcctaccagggctagtttgaattttcctaggtcacacgggcaagccagacgctgcttacgtgcattgagtgtggtgtgagcggcttcagaccagattcctgtcttctttacacaactctaggttttctgtgcctgttttcggtgagcacagaacaactgaaggaagcgcgggacagacacaagggcgggcctcggtgccacggctggccttgggcagagggaaatgctttgtgtactttctctgggaagcagcagccccagcgcggcctcggcgtcctctgccgccaactgctccgtgaccgctgggcgtgtgtgcggggacatgggagcaacttcacagtggtgggaagtttctctcctaaaacgaaagcttctctatactacagattggccccattaaataaaagaaaatacggtgtatttttacagcgtttgggattggaaatgactgagattcacggtggctctagtcctgtctcctgaagacggagctggacgaggtctgcggacagtcagaaaacacgtcagggttttggctcagctgccagatatgcagctatggtgggatttctgcggcagggcaaggaagtggagacagttcgcgtggcagagcacagcgggtgccctatagtgggcacgcctggagagcgtatattttcacagggcccgaaacctgaatggaggattctttccaccagctgcggggtgggggggggctcaggcacatcagttttcccacccagaagacgaaggcctgcgaagggggccccatgaggcctgggaagggggccccgtgagacctggggttaaatcttccacagcaagcagggaccccagccaggctctgcacaaggcaggcgctgcgctcaggtgggagtcctgtgagatgctcctgcaccccacactcccgtgaccacaggcgaggcctaacgccccccacgccggttcatctcgtctcctcaaactcccaccaagatgctcacgacagggcccaaatgcactcccggggggttggctagtctgcaggatcacaggctggcccagtgaaaacctgggcttcgctgccttacaaccatgcagaactcatagccaggccatgtgcccacctgcccactgggaccccgggacagtgcctgctccagacagaggctgggagctctgtgaggggcacatggagtgaagcagagcctgcggctcacctgtttggctctggctggccaggtgccccctcaagccccagctcagccttcccccaaacactcagctccatcccccaccccagcgggtcagggctccatcaagactgctggtgaatggccggctgaggaggcagcgaggcagcgggtcagggctctgtcaagactgctggtgaatggccggctgaggaggcagcgaggcagcgggtcagggctctgtcaagactgctggtgaatggccggctgaggaggcagcgaggcctttggagagggagggccagggtcacaagaccagcagggcacaaaggtggctacgggaggagcaggaagtcaacagccgcaaacaaacctcccaagccactcgaagctgacatccgcaggccacagggacacacctgaggctgcggaggggcggccacagaccttcacagccatcctgggtccccaggcaggcaacgcccggctgctcgtctgctgtccacctccctatggggacacctcaaatcacacgagaattgtgacctcaaaagcttatgctgcttttgcacagaaacagtgacgtgtgaaccatcctgggatggtatgaaagacaagcgcaggtctggaaaagcagttcagaagccactcaactgtctacgctggggagacggtttcgtgagctaccaccacagcctataactacttatccattaaaaatgataataaaacccaggaagaggccgggaaaacattcaataaaccagcgtgctgagggaatctgcacaacccccctccctgcccaatgtagacgtgtgacgggaagtggcaggggcagcagctcctctgaggggccccgtggcaggcaggccctggcgggggctgggagggctcaggggcaggggtgactcccagatgccctccagagggtccagggccctgcaggagccaccagccctcaccactggagtccccggcctcccagctctggggaagcagccctggagaagtggcgcccatgctttctagaacctctctgaagggttgtttaagcagcgagggcccatgctgccgtcaagaacacacaattctcaaggtcccggctttggggagttcccccaggccccgaacctgaccttggcagcccctctgcgtggctcaggaacgagtcccacaagcccctggctcttggccggaaaccggccaccaaaacagactgtgaagggccaacccctcctcccagggaattccagggctcagtaggaccctttgctttccctggggttagaaggacaggtgctggcagaaacgcaaaacagagtggccactttggcagctttgtatgaagctaaatgtgcacacactgtaagaaccagcgatgcccaatcctagcgatccacccaaaataaaattacgctcacatgaaaccctgtatgtgaacatttaaagcagctttataatagacacaatctggaaagaactcaaatgtcgctcccacgatggcgggacacagaccgcggcacagccccccgtgctcagtggcgagcagccacggccacctggtgtgcacgacgtgacacaccatctcaagcgcaggaggcacggggacagccaggctcggaggctgcacacgcacaggtgccacccgcgtgacggtccggggagtctgatcacgggagcagagtgcagccgcacggccgccaggttgggtggagggaggggctgaccacccagggacgggcagaggagtctggaacaggacggtttgtgcgctgcctgcgagcaccgtgcttccacgactagatgcctctgtggtgaaagccaaaaggagtattttactgcacacaaattctcagaaatgatcatctgaaaactacaggttctcggctaaggcacccaggctcagactgccgacacatcgttaagcagctgggtaccagcagcaatgacctcatccctctgactccgtgacctcggctgcagagggtcacggcgaattatatacacagtgccacgcacatgggaagctctcagtgagagagggtgggctgagagccgcttggcctgggccctgcacctcgtcccactctgcatgaactgcctttgcgggtaaggtcggggagaaggtgccaggctgtcaaggcccagggtgcagggggccaggtgggaagaacaggaaggccggccgagctggagcctgcacggccctgcatttgttactctgcctcttagactatgcagtggtagcagtggaggagggggagcacgccccccacccggcagcccagcaaggctgcaacctgcagctcccaaagggcttggtccctccccgcgtgccgtcatccagggccaccagggccggggacggtgccgggcagtgccgctgggagacgggcttggtgcctaggccgggtgggggtgagctaagcacacccagccccgctccaccagactgaccttgccaggctgggatttgagagggcttcggggataactgtgaggaccccctctcctaagacccccaagtcagggggccatgaaaggtgggggaaggggaacctgtctgggaccactcagaattcttccctttccttgtagagcccgagcccgggcagaagaaccagaacaaaacctaagtacaaacacggcgggctcgagcggggcttggcacggcgcaggggtggcggcaagggggcagcctggactggagccagaaagcctgtgctggcatccgccacgcggacggggaagctgagacccagggctcaggtcacgcttacgtcgtttggtagccaggtaccaggacctcatgccatacacagcacacaggctgtggagctggagccagtcgaggaacctggaagccccgacccagacaaggcgcagcctgggggagggacagggaggcctctcgaacccatggctttcttctgcccactgcagcctgggggagggacagggaggcctctcgaacccatggctttcttctgcctgcacaggggcccctcctgtccacgataaaagcccagtaataaggagaaagcagtcagcagccttcacctcagctccagactccgttctcggggccaagttcaggtgtgtgcctgtccccccacccaccaggtggccaggcctggctatgaccgcacgggagagcagggcggaccccgcgaacggggacagcacctgacggcgacatccacaaacgccgccccgcaggagcacgcactcccacacaaagcgcctgcagctgacagccgccgggaggggacatctggacagcctcacgcagctttcagacctgcagtccatgttaaaaggatcttgtttccaatttgccttaattaaacaaacattccaaaccacttcctctcagtctgaccattgttcttcattccatggtactcggagtcctgggaaccactcatcactgtcgggtgcaggtggacgtcccctcacggtaaggtcagagtgctcccgcccagcgcgtggctccgcggcgccctgtgtgcctggggggtgagagagggtggcgggggcgaggtgcttgtgaggcacatcacaatggggcccgagggcgctgcgtgcacaggactctacagcacagtcttcatgggccgttggtctgagttactcagagcaggggatgatccatccccacttaaagacaaagtgaatggggttaaacaggtgctgtgagtggctgggacgggctcacaggaggaggggccagcatgggccacgcaccacactctcacccaagacccaaagccggccaggccaccgatgggcagagatgactgcagcttccagaatagtgggcttcatggggtgggcatcccaaagcatatcacagcccctggggggcagggcaggtgctgcatgatcctggtcctgtgtccagctcctgccactgccccatctcgtaaccctctggacacagagaacgcagagaacaggcagtgttccatgttcccaccaaggggaagatccagcgcccgcagagaactaaggaagcaccggggagtgtggtgctactgaagagaggatgcgtcatttgcatttatccaaagaaagggttcacgatgtcttacgttcaaacagataaaatcagactgaggtggggtgggaggagcctccccgaggctccttgaggaactgcctggcagtgaccgaggtggggctgggacaatgcccaggtgctggcctctcctcggatattccgccatgtgctcctgggggcggagggtcccccaagggcagagctcagccagcaccaccctgcccactcttctgtaaagtgcccctggcacgacgctcccagagaacccaaggatgcgcccagaatgctcccagcaaccactgagggggccctgctgggagacccgcaaaactgccaatgccttgtaggccagcagccgcacgcgccttcagtgctggagtcacgcccaggggctgacgggccagatggtctctgagtgcagcaaattccgtcttgtgagggaaagtgatagaagatgagagtgtgggccgggcgcggtggctcaagcctgtaatcccagcactttgggagggtgaggcgggtggatcacgaggtcaggagatcgagaccatcctggctaacacagtaaaaccccatctctactaaaaaaaaatacaaaaaattagccgggcctggtggcagacgcctgtagtcccagctactcgggaggctgaggcaggagaacggtgtgaacccgggaggtggagcttgcagtgagtggagttcgcaccactgcactccagcctgggcgacagagcaagactccatctcaaaaaaaaaacaaaaaaaacaaaaaaaaacacgagagtgtggaggcgcagacgacgggagcacctgagcttccgtgctcagcatgctgtggtcaactgtggtctgcacacacccaccgttaactgggccctccagctgcagacaccaaacagggacaggacggcggcaccgacgcgcccacgtccaccagtgccaggcgacacagcagaaaaccaggatgccctgcccctcaccgcactgtttccgggctcggcaggcacacaccctgaatgaaaggctccaacctggcgcggagccacggcctgcgtgcttctgaaggaacaagagagacgaagtcactgtgggccgcaccacgtcctgacagcagctaacctccccaggccggaatggaacagatggaagacatggcaagtctgtctgaggggaggtcacaggatgtccctaaagtcaggatatggcacggaatgcagaaattggagcagagttccaaccccgcctgccactggtgcggcaaaacccgcacaccccacacacagcttccttgggacctgggctctttctataaaggggctgctggtgcatgtctccttaatgctccaggcctgtgaggatcggatgcccgagggtgctcctgcatgtcacgcggaggcgggggacgccagcgatgccctcccgggggcgtgggaaggggctctcggcctcccttgactctccatcatcagagaatgtgtccgcctggcatgtgagacacggcgcacttctccgaacctcgggctgtcttccagcatgtgttagctctagaattccttctgcacacagcttgatgtctcccctgtaaggtggatccggcgcgtggtactgtgagcacctccaaccaactgctccctcccttgtgcctatgggggagaagcgaatgagccaggactgggctaatctcaggcagtgccgccccacccttgcccctggtggaccgctccccttgaaaaggagcagcagttggtgggaagggaagcctcactccgcccagcagagacaaggggtgtgtgggatctcacagaaccgtgtagacccacgcacccccactgtacagatgggcactgaggctcaggaaggttagagacgttgcccggtatcacacagcacgtggggtgaggaagtggaacccgggctggagccggcaacgctgaaaaccagggttgtttggacggcgacatgcaactccctgagggctctgctcctgcagaatcagggggacccatgctgctgcctaccatggagggcatgggagaggactggggatgggacagggagcaggaaggggttgctcagtcagtcagtgctggcagagggaggggcgctgggaaggcactgcaggccctgtgtctggggcctctcagcacaaggactgggctttgcacgcgaggactgaagggtcaaaggcgagggccaaggtttcctacgtggcattcactcgggagggctcctgaagctggagacacactgccttactttgtgcgtgtttttctctatgcattatccagtatttggctatgtgtgcatttagctcaataagcaatgatcagatgaaattccccttgaagttctttccttttattctatcctggggatgaacagaaaaatattttcacttcttaaaaattcataacgacatcagatccaacaaggaaatcagtgcctgaaaagatgactattgacccaggacgcctctggtgtacaggccgagaccatgtgctcagagtcagccggcccctcccagatctgctcctggccagctgtgaggccgcggtgacaccacctccctgcagtcagtttctgcaaccatgagacggggagaaggacagccctgcctcacaggctctgaaggagggtgacctaagatcaagcacgcagagcaccgcacagcgcccagcatgcatgtgtacaatgtcacattctacactgaaggaggctgagacaggaggatctcttgagcccaggagttcaagaccagccttggcaatacagtgagaccttatctctacaaaaaaattaaaaaaaaaaaaaaaattagcggctcgcatctgtagtcccagctactcaggggccggggtgggaggatggcttgagcctgggaggtggaggctgcagtgagctgagatcaggccactgcacactggcctgggcaacagagcaaaatcctgtctcaaaaaaaaaaaaagatttaaaaatcggcaaaaggtctctatgccttacaaatagtccacgagattcctgccatgccgtcacacatcaagtattaagtaggtcttggagacggaagttcctgcagtccgggccctgtctcttacatcagtagctgtacagtacaagttacttacccgcccagtgcccacaggagaaggctgcgctccaagacccagatgccccgatccgctgactctatgctgcaagcaggaaatctaggagtatcggccactcgcccgcccagggcaggctccccaggaaacccagggcacgtgagtggagagcttgggagctgagctcttcctcagccgctgggatgggcagagagaccagaagccatgggtttgcactagcagggtgcagctatttttaagtgacatgtctcagctatttcaaggtttgaatttttattttacttatttttttctgtactttctcatgactcacatctttcaaaattgtgtctcaggcatttttaatgctgaaatcatctcaacttcacagctggtcaaaaaatgtctaagagcaaatcagctctttatcatccaaatacaaaaaggtacatattagagttgtcaactttctactgctggaagaaaactccacgttagtatttttccattaaaaaattaacacagcattctgtttaggaaatgtgtgtatatttcctaaaatacacatctgaaagactttaaattgctattgcacagatgccttgagccccagcaggtcccgaggggccgagtgcccctggaggcccagcaccccactcttgcacctgcaccagctctcctggcggggagcaggtcccgaggggccgagtgcacctggaggcccagcaccccagtcctctgcctgcaccagctctcctgggggggagggggaaggggggagcccacgcaggtctctgaaccacgcctcaggctgcagcagccgcattactcatactcagcggacaaaggatcactcagcattcaatctcaccacttcaaaacattacagagggaaaacgacacctagaagtaggagtgagattcgctgaagttcccttctgaggaagacccacccctccgcctggagagccggggctggcggtgcctgaggaccccttcggcctggacagcccacgcgggcttggggggcctcgctctgccctcatggggcggccatcggttcccgaagcggcgagtgaaaattcaaatggccagtagggggcgcactcggaagtggccgccccgcatgaggcagttcagcggccccgagagtccggggagggaggtttattctccgcctgcacgagactgtgaaatccgcaaccatgagcaggagaggcggccctggtggggaagaggccaccaacatctggacggcaggtaagttccgacgcttctgcagcgagcgcgggaggagggacctgaggcaccgctaacactcagagaaaactaccggctgagggtccctggtctgaatgcttgggaccggaagagtttcggagttcagatttttgcagattttggaatatctgcaggtacagaatgagaaagctaaatacgaaattcatttgtgtttcatacacaccttatacacactgcctgaaggcaactttataaaaacacttttaacaatttcatgcataaaacaaactttgaactgcctggactgcagcccgccacacgaggtcaggtgtggaattttccacttgtgtcacgacgctccaacagtgtcggactgtggggcactctggatttcagatttccagatgcttaaccagtactcagattcctaagttacttgtcagaaatgcctatttcttgggattacacttctctctgcaaatgtctgtgaaattcctgttaaattctttatggatcatgcacatgctactaagttaattatgaaatttagtgtttaacgcaggtcagttgcaaaaacaagaatattgcttgcttcaacccaggaggacaggttattgcctaaaagatacacaacacctagtatgatgccttcaaacttaaagaaaggtttgtatctgtgggtgaagaaaagcagttaaaccagaaacttccacaaaaacaagtctagtagaactgagctgattgccaaagtgtgggagaaaaagggccagcaaaaaaatggttaacactagccttctgaggaggccgcccagagcctggccagagaggagccagagaggagcggggcggagggggcctataaagccctgtgccaaggggcagactcactggctcagagggaggacgcacccgccagccagccgggaaccttccctcgcgggctcccagggcgggtctcttcctctctctagccctgctcaggcattcggcaggtccagcagaggtacacctcctgcagcgggttccaagtgcacctccagcctgatgggcctgaccaaggaggcttccaggagcacagaaggggctgcaacccaggtaggactcagcctcggcctggcggtgccataccactgactaggggagcgggtgggtggtgccacccaggccgctgtcctgttatgggaacagctgaacacagaccagacacctcaccccctggtgagagcagcacccagcttcccaaactcaaggcacagacccctctcccccggagctccggtggtctcagcgtgaccgcagcaggggctttgcctggacggcctttctaactcgtgctgaaagcaggacccagtattccgtcacgttctgtcccagcaagaacgtgtctcacttcaagaaaatgagggtgcccactctgccctgccctgcggtgccccagtcactctcaccaaccctgaagccctgggagggccacacgccttttgacagatgcagacttaatacagctgactaaagtgtggctttatttctctatgacaagcagaggaaatctgaaatgaggtattgcactgtttataactccatggccacctccagtgaggacgtggggccagtggtgaatggcacactaggttcctctcacccaggaccacatcagacactaggacacatcagacaccaggtcccgtatcttctcggtgtctggcaacgatcaaaagactcaatttacatgggaaagaaatgaatgactcgtttttaaactatttttcccttggagttcatttaacaaaattaggaaagaaaataaacgttaagttgagggttctgcccacctttaaacttcctgccacgccacggtctaatacgttccaaaatttctacatttaaagagcaaaacaagtcctctgtgccgtttttaagaaattaaatacagaggcgaaatgcggagtctttcaaccttcccgacagagcctgagagcagaggcatttatgctgttcaatggtattatctactaaagatgaatcaagagtgcaaaataaccaaaatcaaattcaccagccccagctaagtgaaggttattcagtacttttagaataactgacacagaggcagtgattcatcttgtcttccccacccgcctgtttttgagatggggcctcactgcagtagctcaggctcgagtgcagtggtgtgatctcggctgaggctcgagtgcagtggtgtgatctcggctgaggctcgagtgcagtggtgtgatcttggctcactgcaacctctacctgccaggctcaggcgatcctcctgcctcagcctcccgagtagctgggactacaggcgcacaccactatgcccagctactttttttgtctttttttagtagagacagggtttcgccatgttacccaggctggtctcgaactcctgaacttgagcaatcctcccacctcatcttcctgaagtgctgggattataggccagccttttttttttttttttttttaagtaagtattttcaagcaataggtcaacaaatctctagtctggttttgcagcacttcaaaacaataacccctggcccggcgcggtggatcacacctgtaatcccagcaccgtgggaggccaaggcgggcagatcactacaggtcagaagttcgatacaagcctgggcaacatggtaaaaccccatctctactaaaaatataaaacattagccaggcgtggtggtgcacacctataatcccagatactcaggaggctgaggcaggagaaccactctaacccgggaggcggcagttgcagtgagccgagattgtgccactgcactccaacctgggtgaccaaaaaaaaaaaacattcaaaacaataactcctaatgatttcaaaaggtaaaatgaaaattcccaaaggaaaaacaactcaaacccattttgaagtgttagtttactccagggcaccagcaccatctgggccaggtaattctctgctgggcttgggcacctgtcctaggcactgtagggagctgagcggcagccctggccccaccagcacccccctgtgactgcccccgcatccccagagactgccagtgtctgcaggctgagacccccgtggcccgctgcatagagaacttccaggagcacagtgacacggggcaggtgacgggaccctccccactggcggcagagccggggtgacacggggcaggtgacaggacctccccactcgcagcagggccagggtgacacggggtgggtgatgggaccctccccactggcggcagagccggggtgacacagggcaggtgatgggaccctacccactggcggcagagccggggtgacacggggcgggtgacgggacctctccactggcggcagagccagggtgacacggggtgggtgacgggaccctccccactggcggcagagcccgggcaccgccgtgggcggacagcccacttctccctctctgcagaggataagctcgggagggactctctccctggagtttcttcctaggttacaaacagcattgcaaaaacatattaggttttacaataatttgttaaaacatgaaataaaaacgtacatattatttcccaaaacaatgacccctttcactctatattacgaaaataagtttatttttggtacctagaacacagaactagcatgaggaaaccgctgaacttctgttttatcgtaagagaagattctgctctgatgtccagctttctggacccactctctctctctcagaaacactggctttcccttcctatcttacttctccatcagctgctgaaatgcattttcccctctcctcacaaatgccgttgtcctggggcggccgtgcccataccttcattgcttcctgggcctgctctgtggctataaagggaaaaacacccctgcctgtgggagtgactcacgtccagcctccagctgcagctgagcagccgtgggacctgcaggaaagaaggccatgtacttcccacaggcgactcttccacctcagctcaaccacagccacctcccgagctcataaagctgaggttctggccctccccagtgctcctgacacacccagactctacagacacccggccaggggagccaggccttgtcccaaagctggggccactcgatgagacttcatcctctcctgttgcttctccaggtacccagagagtgagcagctccacgcgggactgtgcacggtggccgacacccgcagggacgcccgccggacgagcacgcggagggccctcgcctccacggatgcaccatgccggtgtgaggagcatctgttcttcccactctctgcagttaacaaacccaacccaaaccaccacaggtgctcctcctggggagtttcctgtctgacaaatgccaggctcacttcaaggagaatcacgcttctttctaaagatggattcaccatttaaaacagagctctgggagcctttcggcaaatcttgaaagctgcacggtgcagagacatggatgtgacttcccaagcccggggcgtgggcctggagatgtacccaggcaccgcgcagcctgcggcccccaacaccacctcccccgagctcaacctgtcccacccgctcctgggcaccgccctggccaatgggacaggtgagctctcggagcaccagcagtacgtgatcggcctgttcctctcgtgcctctacaccatcttcctcttccccatcggctttgtgggcaacatcctgatcctggtggtgaacatcagcttccgcgagaagatgaccatccccgacctgtacttcatcaacctggcggtggcggacctcatcctggtggccgactccctcattgaggtgttcaacctgcacgagcggtactacgacatcgccgtcctgtgcaccttcatgtcgctcttcctgcaggtcaacatgtacagcagcgtcttcttcctcacctggatgagcttcgaccgctacatcgccctggccagggccatgcgctgcagcctgttccgcaccaagcaccacgcccggctgagctgtggcctcatctggatggcatccgtgtcagccacgctggtgcccttcaccgccgtgcacctgcagcacaccgacgaggcctgcttctgtttcgcggatgtccgggaggtgcagtggctcgaggtcacgctgggcttcatcgtgcccttcgccatcatcggcctgtgctactccctcattgtccgggtgctggtcagggcgcaccggcaccgtgggctgcggccccggcggcagaaggcgctccgcatgatcctcgcggtggtgctggtcttcttcgtctgctggctgccggagaacgtcttcatcagcgtgcacctcctgcagcggacgcagcctggggccgctccctgcaagcagtctttccgccatgcccaccccctcacgggccacattgtcaacctcgccgccttctccaacagctgcctaaaccccctcatctacagctttctcggggagaccttcagggacaagctgaggctgtacattgagcagaaaacaaatttgccggccctgaaccgcttctgtcacgctgccctgaaggccgtcattccagacagcaccgagcagtcggatgtgaggttcagcagtgccgtgtagacagccttggccgcataggcccagccagggtgtgactcgggagctgcacacacctgggtggacacaaggcacggccacgtcatgtctctaaactgcggtcagatgtggcttctggctcctcggggcctcgcgagggtcacgcttgcctggtcaccctggggctgcttaggaaacctcacgactggtcaccttgcactcctcacacagaattgctacaatcccaaagcgctcgccccgcagggtccaaaggccagcggtgaccagcctgtcacccagctcctccccgccaaccctgcctgccgctgcacctgcctgccgctgcaggaaacatttctgacaccgtcgaccaggaaagccacacggagaggccactgtgggtgaagcgcctcagttacacaggaaccctaaagcaaatctgccaccgtgggggaactgacgctggagatgcaaggtgctggtgggtctgagctggacgtcgcggtgtgtcctctgtgcccacggtctgagctagctagcgcaccgccgagttaaagaggagaaggaaaacatgctgctctggtgcacgcctgagcgtcctccatcttccaggatggcagcaatggcgctgtgcggcctcaccaggcccacgaggagcagcagcgctcggcccggagcagcaggaaggcccctctgtggagcgcccgccgtctgctccggggtggttcagtcactgcttgttgacatcaacatggcaattgcactcatgtggactgggaccgtgcgagctgccgtgtgggttagtcgggtgccaggacaatgaaatactccagcacctgtggctgacgaatttgtttctacagaaataacagctggggacaactgcggtgatgatgtaaaaaccttcccataaaatgtaagaaaagctgatgaggctggtgacgttcagcctttgtcaataaacctgtcatgtgcggatccttccggaggctctgtcttgggggtctgccaagtggggtgggacgtggggtgggcatggggcactcgggagaatccctcccccctcacagaaaacacagccctcccctgccaccctgaaaactctcacaaggccagcctctgagtccggccagccggacctaacctggcatttccaggctgtccaaaatgccgtgggggcacttctgtgtcatgcttgggtgccatgacaagcttcccatgaatgtaggaggcagggctcagccttgtccagcagcctgtgcgacctaagctgcctttctagaaggctctcggccgcgtgcgaggcccaagagctctgcggcacccaagcgctcctggagcagccggccgggaaggttcctgctccttctcccatcaccggggctggatcctggcgctgctcccctcctttcccgcctcacccacctggcagcagctgtccctgatgttaacaaggtgcacctgaaccagtgcctgcttctccgtcttcacagaaacctgcgcagggcgtcgggatgtgtgggtgaagggaactagccacctgtactaccccctcacttttcctgtgtttgcggttctggtctgtttaaaagctatgatactgttttttatttgtgataacataaagtttgatatgcaaacatattgaaaggaaaaggccaattaaagaaaacatctgcaaaagagcagggggtgaacgggtgcggcacaatgaagactgaacgcagccatgttgagtccaggaaactctctcctcctgtctgtgggacataacacaaccacagtgagtccaggaaactctctcctcccgtccatgggacataacataaccacacatgagcccaggaaactctctctcctcctgtctgtgggacataacacaaccacagtgagcccagtaaaacctctctcctcccgtctgtgggacatgaagctgtgtgtcggtgggtgtgggaagcctgggtctctcaggcaggtggggcctgtattctccatgaccccagcaccgtggtgctgggctcctcaggaacagagcgctgcccagaccgtggcctgcaggagcggcctctgtgcccacttctatcaggattgctttcctcataaatggctcaccgggaagcctgggaacagggcggctcccacacactaacaggtctcgtggaagtggagattgctgtggggtggccaagccagaagccaggctcacgtgtggcacagtcctgcagaacaccgtgcgtggcttgagccacgactcaggcccggcgcacccctccctctgcccttccagagcctgccctgcaagtcaccccagctaaaaggacatggccatcacactgacatccgtgctctggagctccttccaggccccagggacgagacttgccctcctccccagggatgtactcgctcaatgcccaggacagccaggcagcagccccccaaacccccaccccccacacctgggcgctgtctttacaacaatacccaggacagtcacgcagcagcccccaaacccccctccccgacacccgggcactctctttacaagatgcatgcttcaatgaagctccccttttgacctcagtgttgctgatggggaaaaaccatccaagtcccagaaagcaggcggggtgggtgctctaccaccaggcacccaactacctgtcaggcattccccacacacagtcccgttcacatagcttcaacaggggcaagggcagacgctttaaaatacgcagacgagagacccagcatttctgacttccagttctgacgagctgacgtggggagacccacacggaacgtggtctggtccccacccctcacagcagccccgtggggtaagcgctgtccccaccacaccaaggaggcactagaagggtcagtcactgctcgaagccttaaatggtgggtgacacagccaggaattcagccacgctctcctggctcaaagcccacaagctctgtagcactcggcaacccctggcgtctaactggcaaaagcacgccatgcagaaatcatacagggctgggggccatgggcatcgaggggtcacccaaggtcaccagcccaacctcctctaaagcctgctgtgcgggaagtgcagggacggcagcagcggcagcggggagggctcccttaaggtgatctgggtgggaactgcgtctgaacagagccccaggcatcaatcagggacgggactcaactcattcctccacgtcaacccaccacagggaacagtgctgactgtggcgtccttccctccctgccacagacgcggcttccatcctgcccgcaccagacaccgctgttgagtgcgtggaagcgtcacgccgccccactacgccgctcctctccgccaggtctcttctggggacttgcccaaggctctgggcagacagagctgacacgccgccatctagccgccggaagcagactcttgacctgtgaagctggcggcggcactgctctgaggccagtcacacgagcgacaggcacccagcagccaagccaccgggctgcggtaagggcaggtgcaacactgaggtccccacgcagtagagccagccttggaccctgggccctggagtccctgaccctgagatcccagagctgggagctgtaggacagagaccagcaggccgggcagggactccgtgggtgccgccggcgcagccacacacgcccttctcaagcgcttgcctgggagccagggcaaatgtaattgtttttggcaggcccacggtgagataaaatcaaggcgtcttaactgctctgctgtctcctggtaacccaactctcctacatgagtgctttttaaacccagaaagagctcaaaagtacatagctgcaagcatgggaaaaacccccgtgttagcactgaacgtgacctcctcgttctttgtgcttaacaattaactcttgacctcacgagagtgacacggcttacccgcccttcccaggccccgcacctcccactcagtgagaagcggcagcggtgggctcactaatgctcacgcgcccactcacctgcagtcttggggggcagggtgggggagagaactacaaagaaaccttcttaggagggtgtttctgtggcggggtgggaagccattccaaagccgtcctagacaccccgtgaactgggcacatgaggcaatgtgaggaggctcctgaagccggggctctcccagcagaggcgggagacagggcaggcgaggggagcccatgggaacgggtcagggctgaggacaaggcttaacccagacattgaaagtaagaagcagcacacagactacgcgagtacgtttgaacactcacagacacacgctcacatgttccaagctctatctctgcagcccacctgcacagggcctggccccgaacactgccaccctccagaagggcccaggactccgggagaaatggctgatttgggccggggcagggagagacaagatgagcctgggacaggtgattctggttgagacaagaaaggctccaagagcacgtcgggtgacacccaaaggacacggtgtcctcgccaaagctgggacaacgtgagcagtaagatgagtaagaagagacaatcgtgatagaccatgaaaagcaggagtctgcaagtctactccaacaacaaacagacctaatataatttaaataaaatgaaagaatgcatgaatgggaagagtctcgtttctaataaagtgctggctggtaaagtagttggaaaagcatcactctgcacctttcagagggagacgggggcaggtaagagtcacaaatggagggcgaatctcagggggcagtgaggtgcaggggactgcagagcctacctgtcccccacggatggctcattagtgctcggggaaaggtcaccacacagtggagacgggacagcccctcgctgggtgatcacatgggcagcaccaacaaggaggccggtccagatgctacaccctgagaagggtgcgtctcgtgctgtcatctaggaacgcacagcctgagtctcatcaggagggaatgtgagataaacaggaagggaggacggggaaccaggatgcatcaaaaatgtccatgtgacaaaagacaaaggcagagcaatcatcccaaactcagaaggaggaaagagatgtaacaattcgacacaacagggatcctagatgggtgctctaccagaaggaaaagagcgtcgtgaaggattttatggggtcagtcgacaagaatggaataccccgggagataaaagtgctgcctcaaagtccatttcccgagatgggcaacaatgcctcttaggaagcccacactggagtgtgcagagggaaaagacgggactgtgcgagtcacccccaagaggctccgtggcggcaggatgcacacagcaagtggggtgggtgcacagcaaatgcacaggacaaacgttatccactccacgcccatggatcaacctcaaagaaccggaaacatgcatccaagcaagcatttgttcgtgaatgtccacagcagcactgtccacaagaatcaacacgtggaaacaacccagatgtccataagccaatagacggagaaacgaaatcaatctatccaacagtggaatattactctgccatgaaaaggaacaaagcgtggaccacaccacagcatggtggacctggaaatgccacagtcaggaagataaagtcacagtcagggagataaagcagacacgagtggagacgccacgctcggtgagataaagcagacacgagtggagctgccacgctcagtgagataaagcagacacgagtggagctgccacgctcagtgagataaagcagacacgagtggagctgccacgctcggtgagataaagcagacacgagtggagctgccacgcttggtgagataaagcagacacgagcacaatgtccactgcgtgcgtccgccaatgtgaaacgtgcagggcagacaggtccacaggacagaaggctgggaagcggctgccggggctggggtgagcgggggacggggagccactgctgacaggcaatggagtttccctgggggtgaagaaaacgttctaaaattagattgtggcgatggctgcacaagtctgtgactaaaaatcaccgaggtacacacttcagaagagtggatttctgctatgtaaattacatctcagtaaagctgccattgagaccacagtacccattcaagcgccgggctgtgttcctgcagctggccttccttttcagagcctcactgtcacgttcttgcagcggcctccccttccggagcctcgctgtcgcgttcctgcagccggcctccccttccggagcctcgctgtcgcgttcctgcagccggcctccccttccggagcctcgctgtcgcgttcctgcagccggcctccccttccggagcctcgctgtcgcgttcctgcagcggcctccccttccggagcctcgctggtctctgcagaccaattctgtccctctgaagcacaggccaccatcggacagtgctggctaacagccgccctgtgctggtgggccacggggacgccagcccaacactccacacacacttcgttagcagccacaaaacatttcctaagagcggaagggtttccgccatctggaatcctagacgccatccagcatttattgtaaagcttctaattaaagctttctcttctcgctcaccgcctggtaagtcgagctttacttttcttctccacggtgggaaactcattacctggagtgtctttggatgtacttttaaattaaaaatggaggaaaagagcgttagtcaaaattagagctgaactgactgagtctctctggactccctcagaaagtggagatgccagctccgcctcctgcagagcttggttgccagggctgggtcaggctgcctgggcgttgccgtctgacctgtgcacagatgtggccaggtgaggacacaagctgttgtctcgtttgctgtgtgctgttcgcagacacgtctcactaggcggtttgctcagaactccagaggacaagggtacgtcattcaggccacggtgcagcagacgcacctgacggcggggactcaaccacggcaaaccctgagtaataccgtgcggcagatgcacctgagggtgggttcggagttccaatctgagctatggaacctgggtatggacaactggataatccacttctcatttaagaggaacatctgagcccccgtccccgttctgtgcaccgcaagccaaatgggagggagagcctgtgttctgggttacatgaaggttgccaggtggagggtgctgagtggaaatgctatacatgccacttgcctttttcaagcaggtgcgttctcctgtccagccggccaccactgcaccctgccccgtatgagccctcagtggagccccatgtctcgtttgctggcactaggcctcttctcaggcctcctgaagctgctgccagcccacaggagccgacagaggctgggtgccgtgttcaggccactctcgctcttcaggtccggctggtgagcaattctctgggagagagtggacaccagaggcaggcaaagccacacctgtgggtgcaggccacacgcaggctgcacagacccgggacaggtctgagctctgaggcgtgcggcccatctccgcggcaggagcttctgtctgagcctggggaggaaaagcctccacctcaccaagcggcgtcagctggggagcctgggccgtgcgccctcaagaagccatggctggaggcctttgctccagacatgaccagcccctgccttcctggctctctggcaggtggtgagtcagctgacccagctctagcggaaacaaagtgggggctgggggaggggccgtctgtgaaatgtccccagccggagcccctcactgtcccctctgcctccctgcctcccggcctccacaggggcttcttgtggttaaaaaaaaaaacaaaacaaaaccctttctgagcactttacccatctcgcccacaggcagagacgacaccccgaaaggacagctgcgtctacatccatcagcaagtctcccgggaacggctgaggggcagagatgggagaggccacagacgcaggcacagagccccgtgcacccctgctcctggcctaggcggggtctgcaaaggcccttccaccgcaggcacagcccgtcagggaggctcacgctccactcagaaggacacagcccgtttcagggaacacaggcccaggcggccctgccacaggctcccagtgtcatggtggcccctgaggtgacacgtgcgccacgagggcaggcgtgtacgtgcgcacactcccgcagactctgctctcgcacacacccaggctgcgttgctgggaaacgtcagctgctgcggttggtctgtctgatttctgccattgtctggtgggtggaggatggagcctgggaacaagggttaaaaagccaaaggcacgcagaacaaacgccctggacgctggtgtgctgctgagcccaggtactggggtggactccacctgaaacctactgccagaagtcagctgctgggagtccccagaggggcccagctactctcagagcaggcgcgtgcggcgtcggaccaggggctggctctgtagaatgtgagcatctgccaactgagcctctgaacatgacacagtgagcggctccttacacagagccccttccttcctgctcccgccccttccccggctattcctgaacaacttctagagctctgcaccttcagcctcctgtctgattctcgccgggatcagcctccgcgcagccgcccaggttccttgcagggtggaccgtcccgtgtcccagcaccgggccctgcccacggcgtgcctcctgagagggcccactcagcacggccacggcagcctgaactcccagccttggtatccacgcagcccgcagctctctgcaatgaggggccggccgcaggcccagggagatgtcagctgccccaggcaatcacaagcaaggaggtgcgcgtcgcggacacagcacgaagccctgctcggcctccagaaaacgaggctcgctcctgagtcttggctcgctgggccaccgtcaccctgctctctggttcaagaggcagcggccaggccagccgagccaggaacaagctgcagtgccttggcagcgtgtgaaatgcagaaggtcttgcccatagaagtcatcacagcagagcgctctccccacaggggctgggcagcatgtccgctgaccacagacctggctttggggcacgtgcaccacccacgttaaccatccagagctacaggcaacagcccagtgccaagtgcagccagccagaaaagaaaaacacacaaaaaaacggcaaaacacaaactccgtccaaagtccacccacgagcaaagccaaccgcattattcagagctgcgtgcccagcacacggctctagagagaagcgaggagctgggcccagcggcagtggcagttcccttctccaccgcgcagtcccactaaagctgcgggcagctcttgatttgtgtatcttacaagaagaagaggagggggagaagaagggaaaagtcggcgtctgcagccacactcaagttcttccgctcatccacgactgtgaagctcacagctccggccacgctggcgttcaacaccaggtcactgtcacttccacaggggacggtcttgcttctttggtaaaaccaaaggagtgtttcaaaccatgcccaccttccattcacctgtttttaaaatttttttttttttcagagcaggagcggacgtttattaaaaagctttaagagagaaaggaaggtgcactcggaagagaacccagcgggcgacctggagaacaggtgacccactgaactgtgatcctgcgcccctttccgtgagggtgggccgcccgcaggcacggtgcccgcctcacccttgggaagtgagcacgtgtgctgggattgggaagttgcacacgggcaagaaagcaagcacggcgtcagcaacatcagacacagaatcaggggcttcagtaagaaaaaggacagcagctcttccttgcaggaaaatagagtctggaggaaaaatgccccgtcccctgcagcagcttgaacagaaacactgtacagggaggtgggcacaccagggagcgggaagagagagacactctgttgccgtctagaccccgaccccttacccgtgacacggagcccaccacatgtctgagagcagacctctgcagcgtgcgggccggggtctggatggggtctcccgggccctcctccctggcagccccgtccgggaggcgcgggtgcagccagttcacacataaacggtgtggaacatcgcaggccacagggaaaggcgtttacgtggctatccaaactaaacctcctcccacgcccgaccctgtggtaaaagacaagtgtgcatgctgggcaaggacgaaagcttcatcccctgggctgagattgtcgggtgaaagcgtcaaagtggaagtggctactggagaaaaaccctcgcgcagggaggcacagtcattcggcttctttaaggaaaaccccagctatcaggcgctatgcacacaacagtcgttagaatgaccttacaccccacaaaacacacagtcctcttggaggtgtatctgcagctgaggaggctgtcaccacacgaattagcccttatttgtatttccatttcccaagttcaactgtatcaggagacattggctgatgaaactgttgacaaagccagacttcctgctacaaagcctgacttcagaaattcagaccacgctttcattatgatcaaatttaaacccaacttcagaaattcagaccacgctttcattatgatcgagtttaaacaaaaccaacagcgacgtccccaccctgcacaggagagggctgtgctccgtctcccgtgtactctcatggcatctccccagcccctgagacgggtctgcggttgtccccacttcacggtgagacacaagtgtgcagagggtgcccaacccggaactagcttgggggtgggctcccaaggaccaggcagcgtggagagcacccggtggggcaggggagagctggaaggatggaaggaaccctggcctgaacggcccacagcagcgctggcccctgcccagggagtaagttcccaccaaactccaagctctgtgctttgggatctcggtgccacctaagcaccagccccgtgctagcacccaccaggctctgccatggcacccacaggtttcgccccatctggttaccatctcacactgccaggcgggaccaaagtacctgggttgaggtggcagctatgctgagtcctgaaccgtgggcagggctctgtcaggccacaaaggctctggagaaggccaacctccactgtcagcaccgaggcaagggcctcaacactggatttatttaccagcctttaaaagcatcatccgccatgcatgcagtggcccgggaggctgaggcgggagggttgctgggcccaggacttcgaggctgcagtgagctatgatcatgcctgtgaatagtgactgcactccagcctgggaaacagcgagacccatctctaatgcattcacgtcatctatgagcagcaaatgaaagctcagacacctgagaggccggtggctccaaggtgctgcacaccctgacgcccgcatgtcagtactgcagctccgggcaaatcacagcagagctttcctccaggtcagcgcaactgtgttcccgaggggcccatgcagcttacgtggaaaggccaccccgtgccactcagaattaccaggagcgcagcaagtttaaactagacactgtttatgcgcctgacagcaggagacgtgagccgggtgcctgggaaaaccatcttcaaagcaacaactgttttcccagctgtgaatgctccatcctgggaaatctgctcataccactacaaaaataattttgaaaagaccgtacaaatatgcagcctcatctgtccattctggtactttagacccaaaactgaagaactttctggagcacactatccgcttagccagtgactaatattctttacaaacatgagtgaatgttataatgaaataagcttccttgaataaatgtgatgttagttcacttaactgagaacagtaagttcagaggcttcctttgaacagtcaggaagtggagataatcgcagtagaagagagggacagacaggaagactactcttctgcactctctattttcttactatgtatcgcaattttataaaagaaaaatagttgtcatgaaggaagaggtgttacaatcctgggtaaaagggccagggcaggagcatggacaagccacaggctctgggcacctctggaataaaatctcacttcagcttaaaataccaaacgtatactgtgaccagcaatttcaatatggtgaccaactgacatgcccttcgaacgccaagaagacaacagccccagaaacagcttcagtcaggagacccagggtgctggcccggttctgccgccggccggctgtggaacaggcttctggagcccgagggtgacgccccagcctctaagagcaggtgcttgagaacaacaggggctgcctcatggggtggcctgtggttcagtctcaaaagcagcaaaggaatcaatgaactgtgagacgctgatcgttactcactccacagattactgtggtgacactatgtgcaaaaccaggaggccagccatgcttttaaaaatacttagaaaaaaaaattacaagcatgtgaaaatgtaccaaatatttctctttattttattcatattttaagacgaagtctcactctgtcgcccaggctggaaggcagcggtgtgatctcggctcactgcaacctccgcctcacgggttcaggcaattctcctgcctcagcctcctgagtagctgagattacaggcacacgccacgcttggctaacatttctctttctaaatgttttcatgttttctgtatttttcataatgggtgtgttttacttttaaaaagaggaggaaaaggctttgtttttaaaattaaattaagaatgatattaaaagaccatgtataaatcaaatctatgctgagagttcggccgtgtcagaaagacgcgtccatatcacaggaacagagaggagcacacggaggggagaggagagaggtgaaggggcagagggagttgctttccttgctcaacttttccttgtatgatttcgatgctgtttatttaggaaacgaacgggaaatgcagagtgtttccaaggcatgcatcatgcagatgctgcagaagtagcttctacccgctgctcaccgctcccatcctcgagtcccgcacactgcccggccgagcactcagctgtcgggctctgccagccacgcggactctccacatgcggatgccaccaccaacttgcccaacagagacagccacctggtccctgcacagactcaagggtgtgtgtgtctgggcatcagagggccatccagacccagccagagcgaaaccccagagacacgtccttccagcgcttctgagggcccctgtgttctgggtgccgtgtgggggagaggacagagccaagagaggccaggacagcgtggcagggagaggatgcaggaggggatcaacgtggagaggggcaggcaggggccagactcaggctggaggggccgagagcttccacagagtctgctggcagcatagacggattgacacgtcaggaggagcccggcccacatgagcaaaaaggcaggcaggcgggagaacaggtgcagcctggtgagggtgacgggcctggggcaggcagaagggccccactcagggtgtatttcaaaggtagacaagacagggcttactggctgtggggtgcggccagaaaagaaaccagagaagatgccggtgctgccggagggaatccctggctgtgctcccagctcccaaaagaccaactgacctcaagtctgaatctgccgcccccttccctccgtgctgtttctgcagtggcgaagggcagctgggccaggtgaacacacaaagaggaagccaaaccgtggtgcagagccaggccggacagagggatgtggctccctgcccaccgtgaccacggccaggagcccccaacagcaggtcctgctgggactgcaccaggccacggggaagcgcagccctgccagcaccagcctccttgcctgcccgcccagcatcagctctgcctggaaggaacgcagactcgactccgggaaggaaggaagctcaaatgctctgtactgcaggaccatgaagagaagcggggaagggaaagagccacagaggaagccatgtgtccatgtgcactgtgagcaaggccaacacccacccggaaaaactgccgcttagccctgtctgcaacccactatccccaagctcagtgggcactccacagcccgcctaggaatgggagagagcccatgatgcgctcacagacacccagctatgcacgggtcaacaaatacggtcccatctgcaaaaaagagagaaaactgccatttaccaagaacccactacacagaagccagtgactgtggaaccaccaacagacatgactctgcctcctgcttcttaacccagggaagctggtagcttcttcccactctacagagaataagaccatgagatgaaggttctgtctcccaatcacagaattcgccgtggcttccaacaccatgctgcccacaagctgcaaagcacatgccaaaagctcagtcaacaagacagaactactggacagggctctgaactctttttgacaatcttatgaacactaggggttctctccccacaactgtaccaccgtgacgtacagtctgcaagttcttccctgaatcccaccagtggcctgcagggaagaccttcctgcactggagccccacgccccgggaggaagcagaggagggctgtgtcccacactggagtcctgcacccctggaggaagcagaggagggctgtgtcccacactggagacccgcaccccgggaggaagcagaggagggctgtgtcccacactggagacccgcaccccgggaggaagcagaggagggctgtgtcccacactggagacccgcaccccgggaggaagcagaggggggctgtgtcccgcactggagacccgcaccccgggaggaagcagaggggggctgtgtcccgcactggagtcccgcaccccggggggaagcagaggggggctgtgtcccgcactggagtcccgcaccccggggggaagcagaggggggctgtgtcccgcactggagtcccgcaccccggggggaagcagaggggggctgtgtcccgcactggagtcccgcaccccggggggaagcagaggggggctgtgtcccgcactggagtcccgcaccccgggggggaagcagaggagggctgtgtcccgcactggagtcccgcaccccggggggaagcaggggagggctgtgtcccacactggagtcccgcgccccgggaggaagcagaggggggctgtgtcccgcaccccggggggaagcagaggggggctgtgtcccgcgctctgcggggaagcagaggggggctgctctccttggcgggccctgtgggcagctttgcacctatctgctgcggactccacgaatctcacggcccaaacgcacgggtgtgctgacttgtcaactgggggttcccatgaggcgggggcagtgcaaatctgcctggggttctgattctgtgcggatggctttctatccaccccagcttccctgccatgtgtctccgccagctaaaaggattttgtacctcccattttaaggacaagtggctctcggctaggagggcagttgagttccactctctgccgcctgagtgtctgagatcacccgggttgccgtgtcactgctgacacacacgcccctaccgtgtgcacccgctttgatgccgatgggggccatccagtgtgcacccccctcactggagcggctgctgggtctcttctttaccacctgcttttgaattaactatgctagaaaattcggctgtgatatttctcccaggcatttttttttttttttttttgagacggagtctcgctctgtcgcccaggctggagtgcagtgctgcaaactcggctcactgcaactctgcttcccaggttcaagcgattctcctgcctcagcctcccaagtagctgggatcacaggcgccccaccatcacacccagctcatttttctattttttgtagagacagggtttcaacatgttggccagactggtctcaaattcctgacctcaggtgatccacccgccacagcctcccaaagtgctcggagccaccacgcccagcctcttccagtatttttatgtgtgtgaggcagaagggacgatttcccatgttgaccaatccaccatattgacagaagttccatatatctgcattacctaaactttcatgacaagcatgtatttgttttaaacaattttaaaataccttaatccaataaaagaattaagacccttcaagtggtcctaatcccaacaggctgaaaaccaccggcctgaagatcaccttgggaatccagccgacacgcgtggcccctgaggccccccattcctgcgtggttcctaaaagcatataaaaaactctttcactgctcattttcgtaaaggctacagtgtaacactccatttcacttgcagctcagcacgcagtcgctccacaccctggggtgcggtgagtttagtctgcaggtgcgaacacggaacaggtggacatgccctccccactcacctctgcgtgggcgacggagcctttcccgcccgccgggccctccccactcacccctccatggccagcagggcccttcccctcccccgccgggccctccccactcacccctccgtgggcggcggagcccttcccgcccgccgggccctggggcagcacagcttcccgattcccacgtgcctctgcgtctcggcgccacgggtgactttcggtccagatgccagcaaagacatctctctgtctaccaggcaaccacctccatcctcacctcctcacgggcagactctaactacctccgctctctccacaaatgccagtgcgagcgcagcctcgccgggccgtgggctgcgtccagggctacagtaatgagccggagggcagcgtggggaggacaccaatgccggcaccttctcccgggccctccacgcccagacacggaggctacgcaaatctgccccaagcgcagaggcgagcgggtgcccacaggagacagaggacctcgcgccggccgaggcagggctcagtccgtggaagagctctggcggcaccagcgcatgtggtagcaaaatccccacgcagccgctcctagcttcccgccagaatacctcgagatgccaggaaggaaagcgcacacaccaccacaaaagctaagctaaacaatccgctgtgaaaatcagggaggcacgtcctccgacgacaaggatgccgagcagggcttccatcttcatggtgcggctccgagaggaaaagccagccaccaaagacccctcacccctctccccgcgccggcacctcccgggccaaggtctccaaatctaacggaggctgggaagggcccctcagtgcgaaggcacggccgcctgggcagcctgagcgctcttcccgcgcctcccgccacgtcttcccatggctcccgtggggcagagcgggagcgggtgtcgggggtttggggagatccaccatggggccgcatcccgagggagcagaccgggacacgggcctcgcggggcctgtgcggccacagcgctgtggggcgtgggaggccgctgtctgtgtagggcaaaagccataaacacaaacagcccaactggaaaaatatttgaaacatgaaggatagataaaggctcttagtttaagaagtgtgtttgcaaatcagtacagaaaagataaattacaatagaagtggttaaaaaaaaaaaagcaaaaaccacacacaggcaattcacaaaaaaaaaccaaatgaccaatatgtacatggaaaatgaccatcaaccgtaatcttagaagctgaaattaaagcaatcacgccaggtgtggtggcacacgcctgtagtcccagctactccagaggccgaggcagagaactgcttgaacccaggaggtggcggttgcagtgagccgggatcgcaccagggcactccagcctgggcgacagagcgagactccgtctcaaaagaaaaaagcaaaaaaaacaacaaaaaacatttaatgtctggcttggtgctttgcagtctgcctgtctaatctgtggtaaacttttgaggaggcggcaccagatataacatgtctctgttatttttagaattaactgattaaaatgttttgctatttaaaataaataaataaaataaagcaatcaccagctatcactgcttcctgtcacactggatcacaacacccagggaggacacagggtagcaggtgttctgctgcggcccaggcctcatataaccatcttgatggcaaaggttttctcaaagtgcaactttaagggaaagacataaaatgaaaccaactactattctcatccatggcataacacaaaggtgttgaacaaaacagtctttattcaagggcctgctgtttgtcgttttgcttaaagtcacagtttctggccaggtgaggtggctcatccctgaaatcccagcactctgggaggccaaggcgagaggatcgcttgagcctgggatttcaagaccagcctaggcaacgtagggagactctgtccctacaaaaaatacaaaatttagctgggcatggtgatacataaacctgtggtcccagctacttgggaggctgaggtgggaggatcacttgagccagggaggttgaggctacagtgagccaggatcacgccattgcacttcagcctgggtgacagagggagaccctctcaaaaaaaaaaaagttgcagtttccaagggcctcggggcgggtgacactgagtgaggactcgctgtggatggaaaagcaaacatgcccactgcagaaatcctcagcacacgcggctgctacagacgttaaccacggcgtcatttcacggtggcagaatcagtctttctggtttcttccataaatttctctgtattttctaatttcttttacattaatcatgtataactcaggaaaaataatacacattacttttttaaaattacattttgctgagttcgtttctgttgaccacaaagaagcagcgctggcaaacatctgggctgatcacagcagcaatgacagcattagatggaaattccactgacatggaaacagtgggctttctggaatatggggaagtggatcctgttttctttggcccagaatgaggatggtcagatctccatggcagtgaggaaggccggcgagcctccagtttctcagcagttctttggatctgaccagcaggctgagaaagcccagcttagagatgagagaggccggccgggagcccagtgccagctaacagctcacctgccctgcggcccggcctccacctgctcactctgagagacgcctggcaaggtggctgggacggctacccccaaaaggctcctggagaaagagaccacaggagtgccccacacagacagggtgaacgagcctcctcggacaggaacaccgtggatggccccacatgaagccaggaaagtcccacggaacctggcagcttccagcaacgattgggccaatagcacatatcacgagccttggaaaagcaaacgagctttaattctgcttctcctaattcctaggacattaatcggctgtcctcttcgaaacgggagtgctgtgatccaaatggctaaaaaaaaaaaaaaaaaagaaaaagcgatcacaccatgtgccagtgagggtgcggggtccggcctcagctgtgcttgcagtgcgaacgcaaaacggcacggccactctggagaagcgcagcggcttcgtaaacatctaaacatgcatgcaccatgcaacccggcagccacgtcctgggcacttaccccagagcgatggaaacgtatgctcaggcatatttacagagctttactcacaaaagccaaagcccagagatccaaatgttctttgcaccgtggatgaataagggtctataaagcagcagcaccaggagccgtgcagtgcaggatcctcctgtatcttgaccgccacagtggtggttacaggaagctatgcacctggaaaaactgcagggcgcacacacacgcacacacccgcacgtacaaccgtggactctggacgagctctgtgcgaggcatccacgtcgatgtcctggggaagccaggccacacaggcccctcatgctttttttttttttaatttactaagaatctaccgttattttaaacataaacttgctttaagagaaagtgcgagtgagcgccctgatggcactggcttgctgagtactgtgttttcacactgtcccccagcaaccaatgccctgaaagccaggagtgcccgctcccagaaggcgccgcccgggcagcagcagctgctcctgttctctgcaggctggtgctgttcctgttcggagcaggtgtgcgacccacatggcaggggcacggacttgcttcgaccgtccacactgagaagattctgtaagcatcacgaggtgctgatgggtcaccacgccccacaggatgcagaacagctggaatcggatggcagcgctgggcagggactcggagctcatctacttcacatctcacgctccacaggactccttcccgggcggcccttacgacacccacctcgtcccagcccgagcatttcccaggacagactcattacctcctcttagacagcactgattttccgacagcgtgcctcatcccaagccaccacctgtgcctgtaattcctacccgcgggtgccagctctgactgccaggcaaggagcggtgcagaaactctgagccatggcaggcttcgaggggcaaaggggctccaggacccggcctggacggcaggaggccacgctctgctccggggctcttctcaaacttgtctccagggagcgaatggagaggcccgagctcagaaagaagtacaaacctctcagtggctcaacttcccgtcgacatagatactaattttatatttcaagttaaatgtcctcttgttgctcactgatgccctattcttctcctaattaacccgcagtgcagcggtgcccatggcaagctttcccactgtagcaaggacacggccctgatcatttcccacaataaacccagagtcctgccaacttcccaaggggtgcaggccagactgtgcggccactggcccatacaagggccgggctgttccttactcaaagtgcaaccactgggcctcttccacgtggtaggagacgcagaactggaggcagaaagacctgctgcctaagtgccacgatctgtcagggcagaggccgcccgcagctggggagtgacctcagacgcaggtcctaagctgcaggttaaagaggcaaatgcgcccctgtcaccagcgtgaattgtggtgagcctggagaagtgctgtttctgccttggttggactcgatgtttagactcggagaatgaaacttcagccccctggtcaagtccccggcagcctctgtgggtaaatcagctttggttggacacggctgcccccgctcggccgctcatggcctaacgctgttcctgctccacaggccgtgatgggcgcggggcccaagggctacccccttccccagctggcctttacggaaggactgaggccagctctcccatgggtgagggaaagagatggtgatcaggaacaccagcaaaccagggctgacaagagcaaggaatcgccaggcccaaaccgcggggtgagccagggctcagaaacgagggtggcccgggagccattctgcccgggcgatgggcaggtgtctgaggccccacggggcaggaggggaggtggaggggctcgcaggagagctgcccctgccccgcacaaagcagctgctctcacagggttgcagggttggacgtgggtgggagccatggtcactctgcagccttcccagcaaccccataagcaccaaactccctgtgttaaaccccttcctgtttgagatgcctgtgggggtcctgtttcgcctttgtggataccgtgggcatgtctgttaccagactgcagtccacaaaagtgaaagctcatgctttggcggagacaattcaaagtctctacttgcttaaaaattctcatcttttgagataaataagatccaaaaagatatgcctcattttataataaatctttgctgttttttaggagtgtttcttggggagagggaagaaactgtttgattttcatcatgtctgggtgttaaatttctccaaacacttcttgggcattcactgagatgagaaacggccccggccctgccactgcccacccttcgggaaacgccccaccacagacccagcccccaggctcgccctcaccgggcgccaggggatgtttgctatttaacacagagaacaggaaatcaggaggcgctccccatcacctcccaggtcagacgccatccaccctcctcatcaccaacgcccacgcaggatgacttcactacagctctacggaccggcttccatcaccaacgcccatgcaggatgacatcactacagctctacggacaggcttccatcaccaacgcccaggcaggatggcatcactacagctctagggatggcttccatcaccaacgcccacgcaggatgatgacatcactacagctctaggaccggcttccatcaccaacgcccacgcaggatgacttcactacagctctacggaccggcttccatcaccgacgcccacgcaggatgatgacatcactacagcactacggaccggcttccatcaccaacgcccacgcaggatgacatcactacagctctagggatggcttccatcaccgacgcccacgcaggatgatgacatcactacagctctaggaccggcttccatcaccaacgcccacgcaggatgacatcactaaagctctagggacggcttccatcaccaaagcccacgcaggatgatgacatcactgcagctctacggaccggcttccagcaccgacgcccacgcaggatgatgacatcactacagctctacggacccgcttccatcaccgacgcccacgcaggatgatgacatcactacagctctagggaccggcttccatcaccaatgcccatgcaggatgacataactacagctctacggaccggcttccatcaccaacgcccacgcaggatgacatcactacagctctagggactggcttccatcaccaacgcccacgcaggatgacttcactacagctctacggaccggcttccatcaccaaggcccacgcaggatgacatcactacagctctacggacaggcttccatcaccaacgcccatgcaggatgatgacatcactacagctctagggacagcttccatcaccgacgcccacgcaggatgatgacatgactgcagctctacggaccggcttccatcaccgacgtccacgcaggatgatgacatcactgcagttctaggaccagcttccatcaccgacgcccacgcaggatgatgacatcactgcagttctaggaccggcttccatcaccgacgcccacgcaggatgatgacatcactacagttctacggaccggcttccatcaccgacgcccacgcaggatgatgacatcactacagttctacggaccggcttccatcaccgacgtccacgcaggatgatgacatcactacagctctacggaccggcttccatcaccgacgtccacgcaggatgatgacatcactacagctctacggacaggcttccatcaccaacgcccatgcaggatgatgacatcactacagatctagggaccggcttccatcaccgacgcccacgcaggatgatgacatgactgcagctctacggaccggcttccatcaccgacgtccacgcaggatgatgacatcactgcagttctaggaccggcttccatcaccgacgcccacgcaggatgatgacatcactgcagttctaggaccggcttccatcaccgacgcccacgcaggatgatgacagcactacagttctacggaccggcttccatcaccgacgcccacgcaggatgatgacatcactacagctctacggaccggcttccatcaccgacgcccacgcaggatgatgacatcactacagctctacggaccggcttccatcaccgacgtccacgcaggatgatgacatcactacaactctacggaccggcttccatcaccgacgtccacgcaggatgatgacatcactacagctctacggaccggcttccatcaccgacgcccacgcaggatgatgacatcactacagctctacagaccggcttccatcaccgacgcccacgcaggatgatgacatcactgcagctctacggaccggcttccatcaccaacgcccacgcaggatgacatcactgcagttctacggaccggcttccatcacagacgcccacgcaggatgatgacatcactgcagttctacggaccggcttccatcaccgacatccacgcaggatgatgacatcactacagctctaggaccggcttccatcaccaatgtccacgcaggatgatgacatcactacagctctatggaccggcttccatcaccgacgctcacgcaggatgatgacatcactacagctctacggaccggcttccatcaccgacgcccatgcaggatgacatcactacagctctacggaccggcttccatcaccaacgcccacgcaggatgatgacatcactatagctctaggaccggcttccatcaccgacgcccacgcagcatgacatcgctacggctctaccgaccagcttccatcacccacacgcctttttcattttgttttgttttctagagaccaggtcttgctacattgcccaggctggccctgaactcctgagctcaagggatcctcccacctcggcccccctagaagctgggaccacaggcctgtgcttattcaaaaacagacaaaaaggaagcccatcgttcctgctacgggaatgctgccagtgtcacatgctgcccatcttctcatccagagagccacactatgtttccttcagaattcaactgagaccaaaacaagaaaaccacagcacaacgcttacccagcaaaaatatgaaaacaccaggcttctgggttaagccagaaacaaaaaagtagttctgctttggaaaatgtgaattatatggtcatattaaagatgatcacctctatcatacaacactggctcaaaagtcctagccgttgctagaagaaaaacaaagacggcatgaacacgaagtggagacacacctgccattctctgcagaccttttcgcttacttaaaaaacccgatacaagagaatcaattgacaatagaattagaaagctcagcatcattgttagctctaagatcaacatccaaattatctataacttcccaatacaccatcaataaccattatgacacaccaaaggaggaaacagactcaaaagtatcaagaatcctaacaagaaacaagcaagacctttccagagaaaaccataaaactttcctgaatgacagaaaagacaacctcaataagtcgcaaaaaaatgttcgtggagtagaaaagctgattccaaaattcacacaaataagaggccaagaacactgtccaaaaaaacaatgaagaaagagtttcttatggccgggaaaggtggctcacgcctgtaatatcaggactttgggaggcctgaggagggagaatcacttgagcccaggagtttgagaccaccctgggcaagatagtgagaccccatctctaccaaaaaaaaaaaaaaaaaaaaaaaagaggtacttactttgctagatattaaagcatatttttttttaaaaaaactaaagtattaaacagtgtggtaaagacctcactaaataaattacggtataacaagacaatggaatactatgagactcttaaaaaaaaataggctattgtgggctgggcgcagtggctcacgcctgtaatcccagcactttgggaggccgaggcaggaggatcatgaggtctagagatcgagaccatcccggccaacatggtgaaaccccgtctctactaaaaatacaaaattagccaggcgtggtggcacacacctgttaataggatattctaaccaggattctaagacaattcaaatgacaaaagaactgtcttttcaacaagcagagctggggcaagtagatattcacatgcagaagaatgaaactgtatctccaccttgcactacactcaacaattcacaaaaaacaaatcaaaaacgtaaatgtaaagccagacacaggggctcacacctgtattcccagcactttgagaggccaaggcaggaggcttgcttcttagatgtggtatcaaaagcaccggcaacaaaagaaaaatagatcagctggtcttcatcaaaatcgaaatcttaagcgcctcaaaggacatcaagaaagtgaaagagaagccacagaatgggagaaaatacctgcaagtgtacttcccagacacactaggatatctagaatcagaaggtcacatatcacagtgctggcgaggacatggagaaagtgcaactcttggctgggcgcagtggctcacgcctgtgatttcagcacttttgggaggccgaggcaggctgctcacctgaggtcaggagttcaagaccagcccagccaacaaggcgaaaccctgtctctacaaaaaaatacaaaattagctgggcgtggtggcacatgcctgtaattccagctactcgggaggctgagagaggagaatcgcttgaacccgggaggcagaggttgcggtgagccgagattgtgtcactgcactccagcctgggcaacaagagcgaaactccgtcaaaaaaaaaaaaaagggggatagaatgctcaacaaaagattctaaggcaagtgtatctttcttttagaacaaaagaagttagatccctatcacacataaaacaaatttaaattggttctaaaaaatataaaagagaagcacttctttcggaagaaaaaaacagaagtcataaagaaaaaaactgaccttacatcaattatatctcaataaaaagctgttttttaaaaccacatactcagaatgatgagactacacctataagagcagccaaaaattatacctcaataaaaagctgttttttaaaaccacatactcagtatgacaagacagcacttaccagagccgccaagattaagaagctagcagcaccacgtgtcgaccagtgtgtggaggagccaggaccctcatgcttcttttttgttcaacattttggggttttttttatttttagacagggtctcgctctgtcacccaggctggagtacagtggtgcaatcttggctcactgcagcctccggtgattctcccatcttcgcctccctagcagctgagattacaggtgcacgccaccatgcctggccaatttttgtattttttatacagacagggtttcaccatgttgccccggctggtctcaaactcctgaactcaagtgatccttctgcctcggcctcccaaaagtgctgagattacaggcacgagccaccgtacctggccagcagcttctcaaaaaattaaccacgcacttactataggatccagcaattccggtcctcggaacgaaagcatagaaagtcacagatgcaaatgttcacagcacattcataacagccccaagctggaaacaactcagtctccaaaccctagtaaacgggtgagagaatctgtgatcattccgcaccatggactattttactcagccccaaaaatggatggacacggggcgtagtgtggccggcaggcggcccatggactattactcagtcccaaaaacggatggacacagggcagcagggccgacaggcggcccatgaactattagccatgaaaacggatcaaaaacagatggacatggggcagcgcggctggcagacagcccataaactattactcagccccaaaaacgaatggacatggggcagatggactattttactcagccacaaaaacggatcaaaaacggatggacacggggcagcgtggccggcagggatgaaggagggagccggcctcccgctgcctacgcgggcttcagggagaccacacaagttctcggggtctcagttcccccacacgtaagactgttcctcaggttccacctgcctttcagccctgtacatgtatgagttcaaaattcagtcggcagacaacccggcatgcagcagtcagacaggagaaaataaaaacaatgtggtgggggtgggtggaattctactaagaaaaacaattcgggctcccagggagcctccacagacaccagccaccactcagccccaagagttcaatgacacacaatcccactgccagggcagtaatgcttcttggggcaaaataccattggtcttaagtattttggatcagagcaaattctcaaggccatgaagttcacggcctcatttgatggttttataaagctgcggtcttcatgctctagtaatacacactgattttcaagattacaaaagcagcaaatccagagcctctacacgccggttcaagccaagtagccctgctcccttccgctgaccaccacctgtgccccgcgttctggctgtgcgaggcgcaagccccacagccaggcggtcacgccagacgggtttacagccaagaccatgaaacacccagggccagaaagactgcacctgggaacatggtaccctgggcttactgtggcccacgaagccttctgtggccactgcactcacacagggcagcatgctgcacccacccactgcactcacacagggcagcgtgctgcacccacccactgcactcacacagggcagcgtgctgcacccacccactgcactcacacagggcagcgtgctgcacccacccactgcactcacacagggcagcgtgctgcacacacccgaggccttgtctgagccctcatggtccttacacggcaccttgacacatggaccctgccctcgactgaggctccgccggctcgcagccagccacaggaagggatcctggtctctgctagtgggctccatgaggtaaccagagtcagaaaccaggggtgagtctcttccccaggaccagctggccaggtgactgaaaccagcacagcacccacgcctctgcccctggcacctccaggctgctaagaatcagctgtcaagatgctcgtggggacggaaagtgttgcacacataagggattcttacgaggcagaggaagccaggggggttctgctgacatgctgacagcagtggactgagggagcccaccttccatttccaggcagccaaacagcactgacagcagcagggaggcggccaggtcatcacaggggcctccacaccagcagccactcggctggctctgcatggggtggtcacgcgtatgccgccttcccccgcatacggctccgtggcttcagacagaaacagagaagctaagggtcccctttagtgagactggagaggcagggggagggtgaaagacagaaagacctgccgagtcacatgacctcccaccatgtccgccgaccccaagggatgctgggcagcaggcctggctcagccggggccccacagtcctcccgaaggacatgtgtcatttgaaacctcatcctcacaacccgctcaagtgggaaaccaggcctggaagggttaaaggaacgtgaaaacagaactcctaaaccccagctccccggggagggcttagctatgaaacaggaagcagacagggcaaaccctgggacccctctggtccacaagaggaaaggcccaaggcgccaaccccagcggcagaacctcctgcccgcagagctgaggaggacagaagcggcaggtgccagtccctcctaagaccagtgggcaatcatacagcccagtcaccaagacacgagacaggcccatgggagcaactgttcctcctgccgggccaccacaagccgcccacctccccagcactccaggccagcagggccctccgggatggggagctcagcaaacaacacccagagccgagaccctgaggccctggtgcccaggaccgaggaacggccaaacctcaccaacgccagacagaggcaccagggactgaagcctgggagagtgagtgcacccggcccaggaggcttcccgggccaagcccacaggcctgagtgggaaccggaacgctgaaggaacactccccaaggggcgatgaagttcccatcacttggggacgtggcggcgatcctggcgcaagctcagagtgctcatgctgtgggaagaggctgcacggggccccgggagtggccgctgacccgcaggctccccagacggacgttgctgggaggacaacacaatggcccacggggggacacaggcttctccatcctcgatggtggattccggaggttcatccaggatccactgggggaggggagggaagcagcgcagtacttttccacacgctcccccggagcccaggaatgctgctccccaggcccagccgcccaccctcctaagcacttgggttcagcttcacaaaacgcttgaaacttttttttttttaaaacaatttcccatgagaaccagggagagtcagcaaggaaatatccatattagcagagacaccccatttcactgggagactggctcccagacatacaagaacatgagcccctgagcccccacactccatctgaaaaccctcccagtagcccggaaactggccacaggggcatgcagtttgcagagaatccagctgaaggcagctccctccgccagctccctcggaaggaacgtgctgccgacccctgctggtgaaccgggctccaccgagaccgcattccctggcttcccaggccctcttcccgctgccagctcctccaaaggctaaggaaccagctccaggtcgcttcccaacgctcagctgggcgggcctgagaccaactccacgccagtggccggaaagccaagtgaaagctggtgactctgccggcagctgcgtgttacagaccagcagagtccagccctcaaagcgtagctggaggaaacaaaggctttcttctttcccctcttgctttccagctttcttttaatcaacacgtattttaataatgaaaaataatcacatactttaaaataattacttgaacctaaacaaaaggacagacaccactccctcacttgggcaggagttttaacctctgcccacagtcaccgtaagccgagctgtcttgggggtgctgccagtgaccagcggcctgtgtggggatctggctggaggagggttcaccaagaagggagagccagaagcctcttgactcaactcaaaaagtccagggtgacgccgcgcccaccaaagtcgtgtgtgcctgaggctctgcggaattgagactgggctgaaccacagaacaagagctccagcagctctcgggaaaccagcgtccatctggaacccaaactaaaaagcacaactggacctcaggctgtgaagaaggagtgagtaagaggcagtcggggggtggggggggaggggggagggatagcattgggagatatacctaatgctagatgacgagttagtgggtgcagcgcaccagcatggcacatgtatacatatgtaactaacctgcacaatgtgcacatgtaccctaaaacttaaagtataataataaaaaataaaaaaaattttaaaaaagcacaaaaaaaaaaaaaaagaggcagtcagcctgggagacacaggaattcaacagcctgcggaggaggagccgaaattcaaggtgaggctcaggtggaacgcggggctgcctgctgacccgctgcgcgggagccgcaggacctctgcacctgccaggcctcagcctccgggtgaccttggggtgttctgctagagagcccaggacaagctgtctggctgtgcttggggtgctgtctggcttccctcgcccggggggtggcagtgagagacgaccctctgagacagccaggagctcctctaggcacacaccccagcttctcccctccacccacgcctgctgagccgcctgcagccacagacgtggtggacgtgatttcacaccaccttccgagagctcagcactgcctcattggacaggatcccagagtgagctgggccacacccagcaaccaggcacactccaccgtcccgggcatccgtggctgggtagcccagggacccctccaagcactggctgtgcccacctcctgctggaagccgctttgaagggcccacgtgggctccccctttccacctccctttgcacagcggccattttctcatttcatgaaaaacagggccacctgccaccccacatctcacaatggcacactgccccaggcacgagacctccagcactaatcaatggcaaagcttgaaccctggtgtcaccctggggaagtgaacaaatgtaacaagccagcaccgggcccctgcacaactcagggacccagtccacctgtcacttactgatagagctttaaaataaatcctgaaaatatgtgcccaaaccacagaatggtctcaaagtttaaggacttaagcaacaaagctacaacactactcttgttcccatttactcatctatgtcagcaagggcgctcagcactgaaatctgacatgagaacaggaacaaagcctgtggaaacccgctttctctcgagcaatgacagcgcggatccacaggtgagtgtgccatccgcagacacggaaagccctgcccttccacggggtggtaacacggggtgacaatgctcttaccacgatgtgacgcgcgcgtcgtcagatttcactttatgtagaatcatttgtgaaaattcctaatctattatgctgtttcgatcaactgcatgctcctaatggtaaacacagctcaatgcagaagagaaattttaacactcagaacttggtgggtcaaaaaattttttatattttcaaatttaaatgtatatgcatctttttgtggaagataaacatgatacagtacataataaaatactttcaagaataaaaatgcagggcctggagcagtggctcacacctgtaatcccagcacttgggaggccgaggcaggtggatcacgaggtcaggaggtcgagaccatcccagctaacatggtgaaaccccgtctctactaaaaaatacaaaaaattagctgggcgtggtggtaggcgcctgtagtcccagctactcaggaggctgagacaggagagtgcatgaacctgggaggcggagctggcagtgagccaagatggcgccactgcactccagcctgggtgacagagcgagactctgtctcaaaaaaaaaaaaaaaaaaaaaaaagaataaaaatgcaggccaggtgcggtggctcacacctgtaattccagcatattgggaggccgaggtgggtggatcacttgaggtcggaagtttcaagaccagcctggccaacatggtgaaacccggtctctatcaaatatacaaaaaactagtcgggcgtggtggtgtgcacctgcagtcttggctacctgtggggccgaggcaggaaaatcgctggaacccaggagatggaggttgcactgagctgagatcccaccactgcactccagcctgggcgacagagactgtgtctcaagaaaacgaagaataaaaatgcatcactttaggagaagatggctcacgtgtcttttcaagtgaatggtggtggatactcaaatctcaacgttattcataacccgctgcacaccgtttagaaagtgataccaataggtgattttcaaacggacaataatcgtgttattcgacacgaacatttctagatgtgcatttttaaacacaggctttcaggacacgcctctgcacatgcccaggtgaggagccgcccctcgcaccttcccagggcccaaccgaaggcctgctgcaggcccctcaccatcctgcatgccgccaccaagtcccctacacaacacagcacccaaaacagcagtttcctggcagctaagaaaggcagtcatagggttccaactcaaaatttactaaaatccttctttgtcctacaatcgcttctggaaggcaccaagccccaccacgcctccgcacctgttccaggctctgctccacagagaccagcaggctgagccaccccctctccctccagatcagataacaggtggatcccagagggcagggccagtgaagcacaggcggccttaccttggagccggctccttcgccacttggtgcagcctcagggcccagcagtggcccctctgctgacgccttcttcagctttttgttctttttctctgtcacttcaggaacttttctcttctgttttgccatcctgcaacagagaaagtaaattgctgaagacaaggaaatgaaaggcttaactcatgtaagatttttaaataaaaagaggtagggcactctcccattaaaaaaaaaaaagagtattatggaaaacatataaaagttaaaataaactcaaactcccacatttcataacctatggacaaccaacttgacacattttggtatatttcctttctgtcttttttttttttgagtcagggcctcactctgtcacccaggctggagtgcagtggcacaatctcggctcatcccaccgtcacccgggctggagtgcagtggcacaatctcggctgatcccaccgtcacccgggctggagtgcagtggcgcgatctcagctcatctcaccgtcacccaggctggagtgcagtggcacgatctcggctgatcccaccgtcacccgggctggagtgcagtggcacaatctcggctcatcccaccgtcacccgggctggagtgcagtggcacgatctcggctcatcccaccgtcacccgggctggagtgcagtggcgccatctcggctcatcccaccctgtcacccgggctggagtgcagtggcacgatctcggctcatcccaccgtcacccgggctggagtgcagtggcacgatctcggctcatcccaccgtcacccgggctggagtgcagtggcgcgatctcggctcatctcaccgtcacccgggctggagtgcagtggcgcgatctcggctcatcccaccgtcacccgggctggagtgcagtggcgccatctcggctcatcccaccgtcacccgggctggagtgcagtggcgccatctcggctcatctcaccgtcacccgggctggagtgcagtggcgccatctcggctcatcccaccgtcacccgggctggagtgcagtggcacaatctcggctcatcccaccgtcacccgggctggagtgcagtggcgccatctcggctcatcccaccgtcacccgggctggagtgcagtggcgccatctcggctcatcccaccgtcacccgggctggagtgcagtggcgccatctcggctcatcccaccgtcacccgggctggagtgcagtggcacaatctcggctcatctcaccgtcacccgggctggagtgcagtggcgccatctcggctcatcccaccgtcacccgggctggagtgcagtggcgcgatctcggctcatcccaccgtcacccgggctggagtgcagtggcgccatctcggctcatctcaccgtcacccgggctggagtgcagtggcacaatctcggctcatcccaccgtcacccgggctggagtgcagtggcacgatctcggctcatcccaccctgtcacccgggctggagtgcagtggcgccatctcggctcatcgcaccctgtcacccgggctggagtgcagtggcgccatctcggctcatcccaccctgtcacccgggctggagtgcagtggcacgatctcggctcatcccaccatcacccgggctggagtgcagtggcgccatctcggctcatcccaccctgtcacccgggctggagtgcagtggcgccatctcggctcatcccaccctgtcacccgggctggagtgcagtggcacgatctcggctcatcccaccgtcacccgggctggagtgcagtggcgccatctcggctcatcccaccatcacccgggctggagtgcagtggcgccatctcggctcatcccaccgtcacctgggctggagtgcagtggcgcgatctcagctcatctcaccgtcacccgggctggagtgcagtggcgcgatctcggctcatcccaccgtcacccgggctggagtgcagtggcgccatctcggctcatctcaccgtcacccgggctggagtgcagtggcgcgatctcggctcatcccaccgtcacccgggctggagtgcagtggcgccatctcggctcatcccaccgtcacccgggctggagtgcagtggcgccatctcggctcatcccaccgtcacccgggctggagtgcagtggcgccatctcggctcatcccaccgtcacccgggctggagtgcagtggcgccatctcggctcatcccaccctgtcactcgggctgcagtgcagtggcacaatctcggctcactgcgtcctcaaaattccaggctcaagccatcctcccacctcagcctcctgagcagctgtaaccacaggcgcatgccaccatgcctggctcacttaaatcttctgtagaggcagggtcttgctatgctgcccaggatggtcttaaaccccttggttccagccatcctccgcctcggcctccgcaagtgctggggccactgccatgagccaccatgcccagccccgttcggtcttttttctgagtgtttttatttaacatagctgcaatcatacatggattacatattctatatttctaactggacatgaacacaaagcgtttaagattaagagaaataccatttttagtgacattatcataatttcccaaaggtgaaaatctgcctgctctctaattactgaatattttgaattgttttcactttctcctatcaggctcactcatgctccccatcaactagcaaagctgtggcaccacacgggctgcgggcaccggtcctgcccatcacaggacacctggcaccctcgggtggaggggctcaaggaccaccgtgagtctggggtctcctctgagtgggcaaggagcatggagcaggccacgtatgagggtggatgcggcattcaaggggcatgtggttaggcctcctttctccagcacagctgtctccagaacaccacgccaggacggagaagtccagggacggcagaacccgtgtcctttgtggactgtgtgatgagggagccgaaagaggcagctgaggccaccagacttgggagcctgctggaggggctgggatagcaggccctgggcccctgatggaggggtgctggtggctgtggccaggacctaaggaacaacctggggtggcagcgggcagggacaaggctgcttctaggagggagaagcaggggcccggcccacgcctgctgctgcagcgaagcctcctgcatgggctcactcatgcaggacagcaggagcagaagaagccctcacctgaccccatgcccctgtccccacccctcccttcctatccccaccctccccagggccaccccctcacccacactcctccctacactcctccccaccctccagctcccagtctcctctgccgcccccactgggtgcagccgaaaaggagctgagaacagaaaagtgtcctgcagagccccaggctatgtgggccccgggcgggtgggggcgggggggtgccacagaggtgctggggagccaagagacaggagctcaacaaccagcacacgcggcatgcacgctgcttcaccacggcctccagcccggacggctcagacacacacccacaaaggaccacgtcagtaagccagggaacacccagaaagccagatcccaccccaaaagtaaaacagtccaggcatagtggctcacgcctgtcatcccagcattctgggaggctgaggtgggcagactgcttgagcccaggagtttgagaccagcctgggcaacatagcgaggctccacgtctacaaaacattttttaaaaattggctacgcttggtggtgcacacctgtggtcccagctactcaggaggtagaggtgggaggattgcttgagcctgggaggtcgaggctgcagtgagccatgactgtaccactgcactccagcctgggcaaaagaatgagaccttgtgtttaaaaaaaaaaaaaaaaaaaaaaaagagtaaagcaggataggttacagaagagcagcagtttaaaaagcatgatcatcatggaaagggcctggcagcattgagcccacctagggcccaggtgtggtctaaatacccctcgctgtgaaaaagagtcaggggaggtcaagacaggcctgggatgccaggtgaggccagaaaccaaggagacagtcaaagagcaaaggccctgtccaaaaggcagagcctgcacaagggttccccccatcccactcggggctatcactggtaacagcacattggaagaatattcctattgtggaatcagaaaaccccaagccccttattctttaattgagccttatctttaaaaagcatcagaagccagaggctacagatttcaattagctatgtaataagaaatcttggaagaatgagatactgttgacacaggggctctggaaagacaagagaccatgccagccaattaccttgtgagagaaataagaaaagttcagcaaatatttacacacccattactataaaagttaagtaaaatctatattcattctgtaagttatcatttaaaaacttaatcactatgtctatttgctaataagggataaaagacttttccatattatggaaaggttccttttaatagttctaagggaaagtgactcaagctttgagataatgaatgtttgttatggaaaatgacgtttactttcatttactgtcaactgattttcaacaagagtgccatgacaattcagtgggaaagacaaatggtgccaggacaactggctaccaacatataaaagaatggatttggagccctacctcacaccatacacaaaactaactcaaaatagatcaaagtcctaaatggaagagctaaaagtgtaaaattattagaagaaaacacaggattaaatcttcatgaccttggattaggcaatggcctcttacatatggcaccaaaaacacgtggcaaaagaaaaagagataataaattggactacaacaaaatttaaaatttttgtgctgcaaaggatgccagcaagaaagtaaagaggctgagtgcagtggctaatgcctgtaatcccagcactttgggaggccaaggcaggaggatcacttgaggccaggagttccagaccagtcccggccacacagcaagaccacatctctacaaaaaacaaagcaaaaagaaaacccaggctaggcactgtggctcacgcctctaatcccagcactttgggaggatgagatgggaggactgcttgagcccaggagttcaagaccagcctgggcaacatggtgaggctccatctctacaaaaaatacaaaaaattagctgggcatggtgatgcacacctgtagtcccagctacttgggaggctgaagtgggaggatgacctgagctctggaagtcgaggttgtaataagccatgattatgccactgcaacccagcctggacaacagagtgagaacctgtctttaaaaaaaaaaaaaaaaaaaaaagacaccacccatagtattggagaaaatacctgcaaatcacttatctgagaagacactagtaactagaatatataaagacctctaacaactcaacaacaggagacaaataacccggtttttaaatggggaagggatctgaagagacgtctctccaaagaagatacacgaatgaccaacaggcacatgaaacacagctcagcatcgggtcatttaggaaatgccaatcaaagagaaacgaacacatctccataaaaatgtgtccaatgatgttcacggcagtatgtgcctaatattcaagcggtggaaacaacctccgtgtctgtgcatccatggacgaagggggaaacaagacgtggcgtattcacacaggggatactattcagccaccagaggaaatgggatactgacatgtgccacaagacaataaacccagaagacactgtgccgggcaggagaagccagacgcccaagactccacactgcaaaattccacttctgtgaaaagctcaggatacgcaaattatactgacagaaaggagatgagagattatttagggatagggcaagtggagggaagagtgggtgaccactaaggggcacagggtttcttgtggcagaaggaaaaagtcttaaaattagattgtggtgatggtttcacaatccctcgatatactgcaaaaaaaaaaaaaaaaaaaaactataatccctctcaaattatttaccataaatttaaaaatgtaacacccaagtgcggccaggcacggtggctcacgcctgtaatcccagcactttgggaggctgaggcagatggatcacgaggtcaggagatcaagaccaccctggctaacacagtgaaaccctgtctctactaaaaatacaaaaaaaaaattagccgggcgtggtggcaggcgcctgtagtcccaactactcgggaggctgaggcaggagaatggcgcgaacacgggaggcggagattgcagtgagccgagatcaagccactgcactccagcctgggcgagaatgagactccatctcaaaaaaaaaaaaaaacacccaggtgctactttacgataaataaataaataaatgggagaaagatcatttgctataatgtttgttgtgagacaaaatttaggctggaacacagtggcataatcacagctcactgcagcctcgaccacccaggctcaagcaatcctcccaactcagcctccggagtagctggcactacaggtgtacaccaccacgtagctaactcttgtattttttgtgggaatggggtttcgccatgtttcccagactggtctcaaactcctgagctcaagtgatcctcccaccttggactgctgggattgcaggcgtgagccaccacacctggccccaaaatatatatatatatttttttaattcgctgggcatggtggtgcgtgcctgtagtcccagctacttgggaggttgaggcaggagaatcacttgagcctaggagttcaagggtgcagtgaatcacgatcacgccatgatactccagcctcggcgacagagtgagagactgtctcttaaaagggtggggggcaaggctgagcgcagtggctcacacctgtaataccagcactttgggaggccgaggtgggcagatcacctgaagtcaggagttcgagactaggctggccaatatggtgaaaccccatctctactaaaaatacaaaaattagccaggtgtggtggcgtgtgcctgtagtcccagctactcgggaggctgaggcaggagaatcacttgaaactatggagattacagtgagccgagatcgcgccactgcactccagcatgggtaacagagtgacactgtgtctctaaataaataaataaataggccgggtgcggtggctcacgcctataatcccagcactttgggaggccgagacaggcagatcacaaggtcaggagatcgagaccatcctggctaacatggtgaaaccccgtctctactaaaaaatacaaaaaattagctgggcatagtggcgggtgcctgtagtcccagctactcagctactcgggaggctgaggcaggagaatgatgtgaacctgggaggcggagcttgcagtgagccgagatcgcaccactgcactccagcctgggctacagagtgagactccttctcaaaaataaataaataaataaatacataaagagtcatctacctgccctgtctctgactcctttccttcccccatcccatcaggcttttgccccaaacaccctaccacaatgacacccacgtggctaaatcccattgccaactctcagtatgcaacttatttgacctaacagcgttggactgttgatccttccttctctcttgacaggcatttttcacttggcatccagcacagacagcagaacttctgcttttgctcccacctcttaatcgccgtgtccttgaacactgaaggacccaggcttagtgctcagcctcctcactccctcgtgatcccattcagtcatgtggcttcaaataccaactagacgctgatgactttgtttcctctctttacagtctcttattaaccctctccttcaactacacgccaactcaactgtgtatatatatagctatagttgtatgtatatacatatagttatatatatatacatggtcatatatgtgtacctagacatatatacacatatatatacttgaactcctgacctctgtttacactgtttatacacatatatctacatgtgtgtatatatatgtatgtgtatggccgggcacggtggctcacgcctgtaatcccagcactttgggaggccgaggcggggagatcacttgaggtcaggagtttgagaccagcctggctaacatggtgaaaccccatctttactgaaaacacaaaaattagctgggtgtgctggcacctgcctgtaaacccagctactcgggaggctgaggcaggagaatcgtttgaatacgaggtggaggttgcagtgagccgagatcgcgccactgcactccagcctggacaacagagtgagactccacctcaaaaagaaatatatatatatatatatatacacaatttatttatttatttatataaaataaatatataaatatatttacataaatatgtatttatataaatatataaaaatatatatgaatatataaatatataagtatatataaaaatatatataagtatatataaatatataagtatatataaatatatataaatatatataagtatatataaatatataagcatatataaatatatatataaaatatatatgtatatataaatatatgtataaatatataagtatatataaatatatataaatataagtatatataaatttatataaatgtgtatataaatatatatacataaatatatataaatatatacataaatatataaatatatatacataaatatgtataaatatacataattataaatatatacacaaatatataaatatatataaacatatataaatatataaaatatatataaatatatataaacatatataaatatataaaatatatataaatatatataaacatatataaatatatataaacataaatatataaatatataaacatataaatatatataaacatatatataaatatatataaatatataaacatatatataaatatatataaacatatatataaatatatataaacatatatataaatatatataaacatatataaacatatataaatatataaacatatataaacatataaatatatataaacatatataaatatatataaacatatatatgaacatatataaacatatataaacatataaacataaacatatataaacatatataaacatatataaatatatataaatatataaaaataaatatatatatgcggatgtgtgtataaactgtgtatatatataactatatatataaccatatatatgtacttatatatatcatctacacatatatcatctcaagcttaagaattcgtaatcaatacccctgatcaccctccacaaacctgagcttcctagtgttcatcctctccataaacatccatctgatgaggttcacatagtagctcaagcttaaaaccttggtccatccataaatcctctctttctcacatactcgtccaacccaccacaaactcctgttggtttaccactgaaatacacccagaatgtgactcccttaagatcccataggtacccagtccaagccaccacctctcacgatggcttttaaactcctaaatcagatggtgtgtcacctccactcaaaaaacttcccaagctgtccccttccacttggagggaaagtcaaggtccttgccacttggtaaggtccacacgactgccctggcccctcctcgcatctctgggaactcacctcctctttctctctctgttcccaaattggctgcagccacactgggctccctgctgtttcccctgcacctgctgtttcctcgacctggaatgttctggtgcctcactcctcctcctgcttcctttccattctcaaaacccctgttctcatcttctccatggcacttaccatcacctgctctgtgcaccttgttcatctgtctctcccctccagaatggaagttcactagatcacagacttgtctccacttgttgacagctgtagcccaatgccccgaacagtgcaggaggaacccaatgaacgttttttaaaaatgaatgaatgaatgacggaaggaaggaaacggaaagcatgcttatgatggaaagtgaggccaagcgcgttggctcactcctgtaatcccagcactttgggaggccgaggcaggaggatccatcgcttgagcccaagaattcgagaccagcctgggtaacatggtgagaccccatttctacaaaaaacatttttaaaaattatccgggtgtggtggcgcgcgcatgtggtcccagctacttgggaggatgaggcgggaggacggcttgagcccaggaggtggaggctgcagtgagctatgatcacgccattgcactccagcctgggtggcacagcgagacactgcctcaaaaattgaaaaagagaaagtgggagctgaaagcctcggagggcaatcagggcgtcttcagagaaagacaatgaaaccagagccactgcaagccctgacggcctgaaacctaggagccagctgagtcccttccactcgcccgcgctgagttaacccagaggcgggtgcgggtgtcggagcccgcgccgggacgcaccggccgcaccggccgcaccagcctccccagcaccgcggaccccagggccgccgcccggtcgcgccgcgccgggcctccgcgcacccacgtggagggggcggagccccgcgggagcccgccccggggctctgggtctcctggcgccctgacccgccggccaccccgccgccgccccacgcgcctacctgcgcccacctgcgcccacgtcgcccacctaagcgtgaacagctgcgtcgcggacgccgccttccggcagggacccgcgccccaggtaagcgttagtcccgccttcaggagtgcggagcctcccattggacgaggtctgcgtccgtctctccgccggctaatggcaagcggcggcagcacggggggcggttccaggaccgggcgcgggctactgacgccatctctagaggcctagagttgcttggagaggagctggttgccaaggcaacccgccctgcccagaacaagtgcagatgactaggtttgggccccgcagggcttgggggtctggggtgcaagctgccccggccgggctggcgtcccggggtggggcctccgccgagggtccagggtatggagctcggctcggagtcgaaatggatgagctacggctattgggatcaacagggctaggacttaaacttcgtgctgaatttaaaaaatcaggataggtgctaaaaaatacacagggtgggtagtgttataataatgcttgtgtccgggagcggtgactcacgcctgtgatcccagcattttgggaggcccaggcgggcggatcgcttgagctcaggagttcgagacccgcctggccaacatgacgaaaccccgtaaccccgtctctgctaaaaatacaaaaattagccaggcgtggtggcaggtgcctgtaatcccagctactcgggaggctgaggcaggaaaatcgtttaagcccgggaggtggaggttgcagtgagccgagatcgtgccactgcactccagcctgggcgacagaatgagactctgttttaaaaaataaaaaataaattaaaaaaataaaaattagccgggtatggtggcacgtgcctgtagttcctgatactctggacgctgaggtgggaggatcgctggagcctgggagatggaggctgcagtgagctatgatcaaggcactgcactccagcctgggcaacagagccagaccccgtctaaaaaaaaaaaagaaaaaaaagcatgctttcaagtcacccagtaagttaagtgcttggcagccgtatcaagtatgatgtacgttgcctcaggaatccaaaggtgacaagcaaagaaggtgcactcttccttactggtagaagattgtatttggttcctttttctgcataacaaattaacccaacatttagcagcctaaaagaacatttattttttcatggtatccgcggtcaggaaagtgggcgtggctaagctctgtgcctttgcctcaagggttcaccaagttgtggtcaaggtgtccccccagggttgtggtttcatcggaaagcttatctggaatgatccactcccaagctcacacacacggatattgtaaggactcagtcctccaaggtcattagagaagggcctcagccttgctggctgctgcccaaaggccaccctcagttccttggtacatgggccttaccacaaggaagctcacaacactgcagctggcttgccttagacggtgcaagcacacacaagaggaggcacacacaagacgcacatcacagtctcct

SEQ ID NO: 71 - DNA, 128906 bp, Homo sapiens
  source 1..128906: mol_type = genomic DNA
gcttgaggctggaagttccagaccggcccgggcaacatagtgagacttcatctctacaaaaaaattttttctttttcttttcttttttttttttttttttgagatggtgtcttgctctgtcacccaggctggagtgcagtggcacgatctcggctcactgcaacctccgcctcctgggttcaagccgttctcctgccctcctgcctcagcctccccagtagctgggattacaggcacgtaccaccatgcccagctaatttttgtatttttagtagagacagggtttcaccatgttggccaggctggtctcgaactcctgacctcgtgatctgcctgcctcggcctcctaaagtgctgggattacaggctttagccaccgtgccaggccaaatttttttaaaaaaattagccaggtgtggtgggtgccggtagtcccagctattcgcgaggctgaggcagagagaatcgcttgagctcaggagtctgcagtgagctatgatcacaccagtgcactccagcctgggtgacaggctaaaagaatatatatacatatctctctataaaatatatgaaaatacaaaacagaaatcaaaatttaagttttacgttatttccacagaagatattgttagtgataccccctttttttttgctcctctttgcttatcttatgttctgaaattaacatttatcatttttgaatgatggaaaatatattttacaggagcaccgttggagtctttcacttaacactgcctcccaaccaggccagtggtcatgtaaattaagtcaattgtcataaaagggcttggaagtttcaaggtagttagccaaaataattaaaatcctggtgaaatttcacagagctggccattgagctttgactccactgacatgaggctgctgtaaacagacaccaggctccatgttttcaaaaggcctaaaaacagcacaaaataaaatataacaacgattgttcatgtaaagggccacgtgccatctctgtcctgagcaaatgtaacctgaaaccctctctgtctggcactccgggttggcggcacctctctggacggtgtatttgctctccattactcaatttactttcctgaacttgaaatggagtggaatttcaatgtagagttacccattagctccagggctaaatttaaacctttaattaaattaatccgttgatctgaaacacattgcttctccctcaaaagtgcagcaggtttcttaggtgtcacagagcttaattcagtgtggcaattgttccttactgcatttgttaagttgcccataccgcctggggaaacccgcacacgttttcagatccctccaggtgaactcctccaccctgtccccgcccccgcccccacccccaaccaaaacaagcattcgttgtgggtggggactgcgactcctcccagattcagagctactgctctgggagggccgtcaggaacccgtatttatagaagacatggtaggtgccaaacgtgcttatgagataaacgacagggtaactgtccacattggtcccagtttatgagggagaagagatcataatctacaaaaatttgcaaggtgaccaggggaaaagagtgtaaggtcattttagcccacctgggtcttcacagaaaatggagcacatttcagagccaaagtaaaaaatttgcgttgtcctttgctaagagagagatgaaaagtgacaataccatggattggggatgcgtgagttcgttggccacatgtaagatgttcgtgcttctgggctcttatgcatcccaaggcgtgcatttatcccgggggctgcatccttggcctgggaatgaatagacccaactgcaatggttgttagcgatagctttacggtgggacagtctccataggggctgtggacttacccgtgttattatgaaaaggatctatttacttctcggggaccaacggccttgcggggtccaagtaactcgctcgcagtccaaaactctgcaacgctccacataaccgtcctgtagacccacaactctcccaggagcacagccccaggacctaacccaccgggttctgctcgctcacccaattcccagtgcgagcgcgcgggggaaacgtgctcgcctcccgcacctggcttccgcggccccgggagtcgccaactctcccagcaggcagctccgacaacccggacagccgggccgatcccccgccccaccacccgctcggctctcgcgtcctcctcttcctcctcccgtggccccttgcctcccgccgtctgcctctgcggccgccgcctgcggctttgttttcctcccaggtcgcattccccacacgtgattccgtgttattgcaaagagggctttggagcgcgagcgcggggcgcgcgcacctataaatacggacacccggccccggagcccgcgagccagcggccaggcgaccggcgggcggccagccagcgagccgaactagccgagctaggtagcgaggcgtgcgcgtgggccggggcggcggcgcccccatccccagcaccgaggggcgagcatggcccgcccgcgggggggctggaccgccgcgcacgccgcccgatccccgcgccctacccagcccgggtcgccgccgctcgcgcccgccgcttagcgctcgggcgccgctcgcttctccgggcatcgcggaaatcccgccgcagacggacacaatggcggcggcggcggcggccgccaccacggccgcctgcagcagcggcagcgccggcaccgacgccgcgggcgccagcggattgcagcagccgccgccgcagccccagcctcagcccgcggccgccgcgccggcccagccgccgcccgaacccccccggaagccgcgcatggacccgcggcgccgccaggctgccctctccttcctcaccaacatctcgctggacggccggctgccgccgcaggacgcggagtggggcggtggcgaggagggcggcgcggccaagccgggcgccggcggcgcctgcggcgcgaggactcggttcagcttgctcgccgctgccgagcggggcggctgcatcgcgctcgccgcgccgggcacgccggctgcggggttagccgctgggtccggcccctgcctcccacagccctcgtcgctgccgcccttgattcctggcggccatgcgaccgtgtccggccccggggtggcgcgggggttcgcgagtcccctgggcgccggccgggcgtcgggggagcagtggcagccgccccggccggcgcctctcgccgcctgtgcccaactgcagctgctcgacgggtccggggccgccgggcaggaggagttggaggaggacgatgcctttatcagcgtgcaggtgccggcggccgcctttttgggctccgggacccccgggagtgggagcggcagtcggggacgcctcaactcgttcactcagggaatcctgcccatcgccttctccaggccgacttcgcagaactactgctccctggagcagccaggccagggcggcagcaccagcgccttcgagcagctgcagaggtcccggtgagtatccgggatgcgacgcgcacccaaccctgcgtcccgcccggcgctcccagcctccccgcggtctctgggctacgggacacgggttgctcccattttcccgcgccctgccggatcctgtgctccgggcccgaatcccaaaccacgagggcacccaaaagagggggcgtccccagggagtgcggggttacacgtgtttgcacgagcccagcattcgcagaggagcaccgcgcttgtgcagtgggtcgggaattgggagttgcaggagcccagtagaaagcggcgtccgagcctccccacacgagatcacaaacttcctgaaacccggtccagacccggaggcgcactcttccccgcgtggggcgagactcggccgggcgcagagtggagcagtgcaggccggcagctgagcggcgcgtgtgagcctgaacttgtagcagacacgcgtgaccctccggagaagttcttgcctgcgctccaagtcttcttgcggcccggggaaacttggctttttccatttgctttcctgagcaatggaaagtccttcttacattgcctccaactaggcctaggggggtggggaacaaagaggaaatagggcttgagggatttttttcctattccaagatgaatttgcttgagttcgttaaacgcttgttttacttgtttgttagctgaagttatctggcggcattaggcgtcttagcaaaaacatgaaacgctggacgtttgcttattgttcaggaaatagagtttgtcaccatgtattattctaaggggcagtcggaggttgggactgtgtgaactgaagcttgcaaaagaagtaggcgagtaggcgggaacaggtggggaaatgcagatccgttcctagggagtgccctcccttgttggttaataaggcctcttgtgaagttagcaatagcatagaccctaccttgacaaagttgttttaacttcttggggcctcagttatcccttctgggaaagaatgactttctctgctagaatttctctctcctatcatgcttacctgaaagcttgatctggcccaagtaagaaggtgcctatgggaaaacttaacttcctcccgcaatggacaaatgggggaagaacaggcccgcctcatccacaagtttgcccctagtgtacttcttccgaagtgggtgaaatcatgagggtgctagttatgtagcctcgctgtttgagtgcgcatggcccgcaagccaggggtgtggaaccggggaagcagcctcataagtgcatggatgaattagcgacactgggcacaggtgacagccctactccagtatttcttgtcagagcatgcatctcccccgcagcaggtgagggcagggaggtggtatcccttgtttctgggtgagtcctgcaaactcagcgtttctgggcagctcagtattaccgcttgacatcacacactggctcatggtgactccagacttgcagcctaagcccagcagtcaagagggttatgacaggaattgtaataaacatacgtgttattctaagccagtgtgcaaagctggcttgtgtctcctgatggacagatgtgtcctccatgctaaaggcagctggagatcagattacctcgcacgctttctccaagaaactcatttcaggggatatggaagatcttgtgtgttcgcatttctgaaccaaagaatatccagaacgccacctccaatcctataaatatgaatcttttaggcgttttattgatccttttcacctcggcacacacattaagatgaattaatcactggaagatgcttctttacctgacagtcactttcatcctatttctgaataatccgtatctggcaacctgataggcttttataaaattacagctgtgaacagaaacagcttaaattttgggtacaaaggggaaaaataggttacactgatttaagaaaggcggaaaggctagcttagctgtggagaggctgcagacttgaaatatcccaggatgctttgttgccaacaccacgccgcttgtcttatcactagagtacttgcacctgcctagttgaagtgtgctgagagcacagactcacttgaataaggcccgaggccagcttttctggtttccatttgtggaaacctttcctggtgtgcctccctgctagcctgtgtgtttccatgtacatgttacctcacggatggtctcctgggatgttttcatatcaaattgtattttccttggattcatttcttgccattagtggaattccatagcaccttgctgctccagaatgtgggctttgcaccttcagcttcactgggagcagttagaaatgcagactcttccctactccagactacgtgagtccagatctgcagtttaacgagatcctcaggtgatttgtatacaaattaaatttcgacaagtgttgccacagtgtatctgaaatctgccctttaaaaaaaatgaatttgaggttttatatattgggtttgttttgggtatataaaaattagaatgtcgggccgggtgtggtggtggctcacggctataatcccagcactttgggaggccgaggcaggtggatcacctgaggtcaggagttcaagaccagcctggccaacatggtgaaaccccatctctactaaaaatacaaaaaattagctgggtgtattgttgtgcccctgtaatcccagctactcgggaggctgaggcaggagaattgcttgaacccaggaggcggaggttgcagtgagccaagattgtgctattgcactccagcctgggcaacaagagtgaaactccatctcaaaaaaaaaaaaaaaaaaaaattagaatgtctcccaatctgcaatcttgaaaccctttcttcttggttactttcattggaacacttgtaaaaccaatcacaaataattgcttggacttccaaacttcacaacacacagggaggaaaattctgtgcacaagccttggcacaaggtgcacagtaaatgcctgtggaggcaatgattacaccacctctgttcactggactggattcttgacatctattgtatttagccctcacagccaccctgagtatagattctttcacaggtgaggagaacataggctcagagaggttgagtaatttctcccagctactgagaggcacatatgataatctaacttagttgggccaggataggaacctggatcattgatgtccaagctctgccactctaccatgtcactatgccttgcacacaataggcccatagataatttttgagctgttggctgtaaatgtttgtgtattatacaactgtcccgtcgtactggtataattcaacaccccatttgttatcctcccaaatttagcctcttcgtttgcatcccctagctttgctatttcaccatctctattctgttggggtgtccagggaacccaggatggtgggcctgggttcctccccgcctcacagacgggactccagcactgggaagccaacaggctgggtttgctgtcaggtgcagtgtcagaggtgggaaaccaagaagatgcctcttagcttcatgcctatcgtgtttctctgctctggcggtgaatggtgcatctggaaggtgttaataggtgaaagggagtgtgaatttataaggcctacattaaggcttccattcacttcaaaaacttccttgcaaccagcagttggccccagccctgtgttactctacttcccggagattctggctagcggacagctccccaggaggacatgaagttgagcccaggtgaaccactgtgctgatgggaggggtgcatggtgaccagtgtactatttttctttctttcgttttctttcttttttttttttttttgagatggagtcttgctctgtcacctaggctggagtgcagtggcgccatcgcggctcacggcaacctctgcctcctgggttcaagcaattctgatgtctcagcctcccgagtaactgggactacaggcgtgcgccaccacgcctggctgattttggtattttttagtagagatgagggttcgccatgttggccaggctggtctcgaactcctgacctcaggtgatccacctacctcggcctcccaaagtgctgggattgtaggtgtgagccaccgcgccccacccagggtactattaaaaaatagcatgagggttttgcctctgagaacacttgggttagcatcatgccttgtgggtttgtggtacggaagagccttaagtcctgtgttcagatgctggtgccactgtgacagccgtttgaccccggtgggttaatcagccttctgggtctgtttcctcctgagaaccttggcttgtgtctcaggccctttctagtgtaaaatgcacttacatttataatcgaggtctgaatgtgggcttgtgctaaatgcttcagatttgggcttctcaaatgtaaatgcatttagagtcacttaatctcttaaaagcagattctgtatttctaaccagttccctggaatgcagagtggccaccctttgaggagggaggctttacccactatgatgatttgttcctgttgtcaggccaaggaacccagggctcaggagatgttaagtggcctgcccaaggccagttggcaattaatagcagagctcaggctcactattgctcagctgacttagagcttctgcctgcccctcccgctgcattgcccctctttggaggaaatccaggcttgtgctgtaattgtaatctatgtcttgactgaaaagaaaaatgtgagcccaccacagatcaagaatcagggtaagaaaggggagatggatgctgtttcctagctttttcaccacccgctttgtgacatcaggcaagtcgccagtctgtgtgtgtgtgccccagctgtgagccacctgacccctcaggatttcagaagtctgtaaagaactttgatctcagcagtaagcaaacacaagttattgctgagccatttttccagcaaccatgggttttggaggtcggagttgtagccccaggccaggcgggggcctgtggatggtgggcgcagtctgaggcttccctgctgcccttgttgcagtcacaaagcctgcaatgtgggcgagctcaggagaaatacataggaagcctgctcactgctggcaagtgcctggggaggccagtgagctcaagggtgagcttttgctctctgaatgggtggggaagccatcacatggctctgcgccacgtgctcagtagctttcccaggaagcgccgatgcctggactttttttctctcttcagaaagatagcggtgaggtggcagagagccaagggcaggttttctggagggtagaataggaggcagtgcagttgagcctgtgctgtgacctgatgtggcataagagaggtcaaagcaggactttgagactcctgggttctgggtcttagtttccttatggaactcagcggttgggacagatgagcctgccaccccttctgggtccaccattccacgtgtctcggtcctgtggcctgctgcagggtctgggggcatgtttagcctggggacgtgtggataatccaacctcagaatcaggtacaaagtagcattaagtttgttccatgtggctctgatgggcagaacatgtaactaatgaaggaataaatggatgaatgaatagggctgccccagagtaagggagaactttaaaaactaccttcagctgtgttccttcaggcacgggcaatatcgcagctggactgacaatgttaggaggccatccaagcaggaagccactgcctggggaggcagtcagtcccccagatgaaactaccctcacaccaaggacatgatctgtagtaacctctattgctaaagggccttcaggtttacaaagtactgttgtacatgttgatatcagaccccagacaccacagaggggcaggagtccaaggtcacagagtgaccagggggtgacttaggttgcagtgttatctgtcagttatgtagaaaaggaaatcttggtattgagacttaatgccttgtatcacttattcattcaacaaacattgaacacaatgagtatcaatcatgagtcaccgctgtcctactcatgggagatggaggcataaaacatggtccctgtctgtgctgggtgacataagtaaacgggcaagttggtagagtggtgagtgagtggttagaggtgagcttgttgtttgaactccccccacctggggaggggtgcagggacgtttcacacccttccctgtggcagctggcacagggccttggacacggtatttttatttaacaaatatgtggcaggcattattctaagcactttgatgggactgagttcatacctagaaacaccctgagacagtactaccttcacctccatttggaagcacagagaagttaagtaacttgtctggggtcctgtgctctgacccacctccctctgctgtgctacaatttacaggtcaggctcatgcatgcttgttaaataggcttcagctgaactgagcagaagttgacctaaatggcctcaagggttcccgatcacttgtgatttccttgtttcagtttccacttttctgtcatctagggaagacctctgtgcatttgggcccagaggacaggccaggttttaaatagggattcctgtgactctggcaattaactcccgccctctgcctgcctgtgcttcctctcttcttggccacagctgaatccctgacacctttattgcctctctgactcacctggtacattacacatcttgtgttatatagagcatggtacaattagcaacaggaacctggcctcctaaagtttaaagctctgctgggtcctcgtctgtgaaatgggaatgatactaccacctccgccctgggcgggtttcccgctgtatcttctcagcatcaccctttccccaactgcccctctggctgtttataaataatactttcttggaaaaaccacacccactcgtgcaagtcttgcctttggctgcctttgtgctacaaggacagaatcgagtagttgcgacagagaccacatggcctattccctggcttgtcacagagtggttgtgcttcccccaccctagcccagtgctctgtgcccaggaagtgtgcaggtccccttggccccttcctgcctgcctgcaccctccttgccttgtttcacagcctggataatgtggtggcccgaggggctcctggcttctgtttggacccctgtcaatccctccccccctgggctgtcagagggacccttctgaaacccacatctgatcctgccagtcttaaattcctggtatttcaggcgaggcagctgttggcttgggtcctggttgccactgcaacctcccccgctcccacacaccctctgaggcctgttgctgccatactgtgttgtctttacagagggcacccacgctgctccgtgccccaggctctggcactctcaggcttctcctggggcaaggcctcccacaagaggccccttccttccagctccgtcagccacagagccagccgctgctctccccatgctcgtacacgctcctggctgggcctcttccttccctgtggatctgtgcttcagccctggtctgactggagggcccctcctccgtggtctggtcagagcttgatggattgccctggggccagcttttggtggaacagaccacatctctcctccatagggaacacaaatgaaactccaattccctaacagtaagaggaggaaaatttgattctgttcccccaccccacaacgttctaggtctttgttttcatccagcagttgctcctgactcttaatttgctaaaacaatctgtcatggggctaaggtgagacagattgtggaggctgcaccacccagcccaccctacctgagcctgtctctcccaccctcaggagggaggtgacttgtatggagttctgagtacctcttgtgtgccacatccttcacgtatgttgttttatttgcgtggcagtctgtgaaacaggttgcctactttagagctgagaagactgaggctggatggttaaggaaatttgtctaaggccacatagctggaatctagagctagaattgaactttagttttcctggcttctaagctgggtttcttgcagaccctgtagtgtcttggagctgactcctacccacttattggagacgactgaggaatctgaggtggttgctgaaatcggttgtggtgggaatatttacaccacaggaatcggccaatgctgtaagtcaaggtttttctttttccccttccagagagttggttatcagcatgtgcacctaaggctttaccacacatcctttttttttttctttctttttttttttctttgagacggagcctcactctgttgcccaggctggagtacagtggcgcaatctcggctcactgcaacctccgcctcctgggttcaagcaattctcctgcctcagcctcccaagtagctgggattacaggtgcctgccaccatgcccagctaattttttgtatttttagtagagacggggtttcgccatgttgggcaggctggtctcaaactcctgaactcagatgatctgcctgctttggccttccaaagtgctgggattacaggcatgagccaccgtgcctggcctaatttttgtatttttagtagagatgaggtttcatcatgttagccaggctgggctcgatctcttgacctcgtgatctgcctgtcttgaccttgtgatccacccgtctcggcctcccaaagtgctgggattacaggtgtgagccactgtgcctggctcacacatcctttttgtcctgttctcctctttgggggctgtgcaaaatgtcgctatcaaaggaagcatgttgaaaaccagaagtttttataagaatctgctgcttaacataatgatgtaaattttccccagggtcaccattatccattttttccactttagaaaaatatctgtccccctcaagtttcagcctgtgtaccatttaaacaccaaacttttcacagattctggggctcagaccacttagtattacatacgggaatcatgaaatcattagctattaccctgttttaccaactgtgtaatgttgtatttttatgtttgtttgattttgaaaagcctctaagaacgtataattaattggagtttgctagtttgtcttttcctctttgttttagtagtttggatggctacgcactagatcatatttaatgaggttatcattcattgtggtttggggcttattactgcacatttggtcacagacaagagcttgtaaagcagaacgtgcaaataccaggggcttatgactttagaatattgtaatgatatgtgtgtgcaagagggacccaatcttgtccctggtttaaagcacagggtatatgtaaatctaagttaggttttacgataaacagaagaaaaaccattcaaccagatactagtaaaatattcaaaaatgccaaaaatgtttatgtgcctagcacgttgatttttattttaaagcactttactcattgaccaaattatttataaagcaaaatgtctacttcgatagttttaagaagggctgggtggcggggtagaggaacaaatgtaaggagctggaagatattcaaagtctaaagttttttgcttaaggacaaaaactggcatgttagggggacaaacggttgatgtgatgttgaatggtagttcttttttttttcttttggagatggagtcttgctctgtcgcccaggctggagtgcaatgccatgatcttggctcactgcaacctctgcctcccgggttcaagcgattggccaggcttgtctcgaactcctgacttcaagtgatcagcctgcctcagcctcccaaagtgctaggattacaggcgtgagctaccctgcccagcctgaatggtagttcttgatgaattattttatttattgagttgaataaagtttgtttttggagggtgagtagtgaagaaggaagatgagattacaaatgtctcaattgtaggattccatttatccatcacaaaacgattgatagtattataagttctgtttatttgtttgatgcttaacagcttaagaagtacttttttaaaaatcaagtaatttcagaaaggcaatgtggtagctgttttatggatttgaaagtcactatgtggtagagctagagttttaacatttacattttctaagttgagagttttcaaaacaaaaactctatcgtagctgtaccattttaagaaaaacgtaagaaagaatcaactaagtactgtagaattttattctccttccagtctcaaatcttctacttgtgagttcgttaaccaaaatgctagggcctcatctgtttaagacctatgggctggagtcagtcaaggtcagtatgttaaagtacaaagaaatattgtgctatagttttggcaagccagcgccttctcatcaagcgagcatgctgattttcacgtgataacctcgggcaggccaatagaaccctgatttgggtccagagtcatggaaaattttcccaataacaacagctctctccagataatattaatagcttggtatcagttcctcccgcagggagtaagctccttcttcttcctgcacccctgccgctaggcctctgtctcagcaaaatgggtgagcagaagagtggaaagaccagctttggagctccatagctctgccgcttaacggcaccttttggacaacacgcttaaccactctgaacctcacgttctcacctgtagtatggggataaggactccagtacttttggggtgttgcaaatattaaaataagaatgcagaatgcaacactaaacacctagcaaaggtttggcccttagtgattgagcaggaaaattgtagctgttatttccattcacaattgcactgcaccttacactgtccaagaagccgttgagaaatttgacaaggtctgctctgatcgtgaggagctgatcctgaacagctaccttgctgcattgttttagtttcatcagtagtagtgaaatcagagcagcagagagaaacagtacccctctgtttggtgctgcattttgcccctgcttacgctggaatcgtgacaatttctattgccaaaataaagcaaggtagggggaattcacatgttcatccttgtacctttagagcaatgaggctgtgaggtgaagagcaacaaccggttttgcccacacccaggcccaggaagacgctgccctacttggagggtcccgcagcccacgtggggcacatgctgggggagggctacctccagagacaatttgagaagacccaacttttgtcactcgttatcagagctatagccctcattccatggtctgcgtgctgcctgcttggcctccttttttttttttttttttttttttttttgagacggagtctcgctttgttgcccaggctggagtgcagcggcgtgatctcggcttactgcaggctccgcctcctggattcacgccattctgctgcctcagcctcccgagtagctgggactacaggcgcccgccaccatgcccggctaattttttgtatgtttagtagagacaggttttcaccatgatagccagggtggtctcgatctcctgatctcatgatccacccgcctcagcctcccaaagtgctgggattacaggtgtgagccaccacgtctggcccgcttggcccccatttctaagcaggataccctctcccgtgtgagggctcctcagggtctgtgtggccatgatgtggagttgagttgggtgctacgtgggtgccttggcctcacctttcagccccgtttcccctctgcacatggcttctacctcctctccttgaccccatggttaaacagagttgggtctttgtccagggatcccatttggcattgggtcagcagggacttctatgtcgattctgcacacacatctgcatgccaggcaagtgtggccttgttcagagataaatggggcccagtgcccattccagaagaggacagcccagcacaaggcagctggactctggggcagccggacaggttaggggccaccattcctgcagtaggagcagtgattgtcctggagatgcccttgaaactgggccttcaggtcagctgtgacctcacggtgggtgcactgtggcaaagcacattggatgcttggtttaagacggtgagtttaatccagaggaaaacgggaagactttgaataggcacaggtgtgagcagagctggatttttcaaaagtggtgacaggttgaatggaggaaggaaactatagcagtgctctttttttgagatggagtcttgctctctctgcccaggctggagtgcagtggcgtgatctcagtttactgcaacctctgcctcccaggttcaagcaatcctcctgccttagcttcctgagtagctgggacttcaggtgtgtgccaccatgcccagataaattttttttgtatttttagtagagattgggttttgccatgttgtccaggctggtccccaactcctgatctcaggtgatccacctgcctcagcctcccaaagtgctgggattgcagaggtgagccactgcgcctggcctcatgctttttgtttttaacccctttggcatcctaattgtctcttcagataaatcaacctgtactcatccaaaatttttacttttaggaagtttgtctacttttttttgagatggagtctcgctgttgcccaggctgcagtgcagtactacaatcttggctcactgcagcctctgcctccagggcttgagccaccttcccacctcagcctcctcagtacttgggacccacaggtatgtgccaccttgccagtaaatttttgtatttttagtggagacagggtttcaccatgttgcctaggctggtctcgaactactgagctcaagcagtgtacccacctcagtctcccaaggtgctgggattataggagtgagtcactgtgcccagccatggaatttttggaaaaaaaagctaaactctatcctggatacgtctgtttttgtttgattctttggcgtgttagcccagtagttttcagaatgtgctctctggaccagcggcggccaggaacttgttagaaacacgatccccaggcccagcctcagacccactgggtcagaagctctggggcggggcccagcaatctatttcaacaaggccccaacttgcgcctgtcgcccgttcaggcttgggagcagccactgtggacaaagccttgtgtacctccagctttactggaccttctggaagatgtgaacagtgtctagtgctccagaaaagattttatttattctagcacaaatggacagaagttatcgctgatgtgggggctctgctatccaggtaatgcagggttgaggttgaggcttggcatcaccaccgttaggctcgccactccttttctgtcccgacacggccatgctctgtctctggtgaacttctaggcttggctctgatgattcccttttgcattggctttccctgcctccttgtgtctggggtatatgttccctcatctgtgtcctaaagcatttcctctccacctctattttaaggtcatagtagttggtgtttgtttttttttttttttttttgagacggagtcttgctctgtcaccctggctggagtgcagtggcgcgatcttggctcactgccagctccacctcccgcgttcatgccattctcctgcctcagcctcccgagtagctgggactacaggtgcccgccaccacgcctggctaattttgtgtgtgtatgtgtatttagtagagatggggtttcactgtgttagccaggatggtctcaatctcctgacctcgtgatccgcccacctcggcctcccaaagtgctgggattacagccgtgagccaccacgcccagccaggtcgtagtagtttttcaagtatccaagcagatttgtggacagcctctgccctgtgccaagcactgggatatgggggagccccggaggggtgggacccctgccaccacagaccttagtggctcgtgctggcaatggggaaaagaggcaaccaaaccaactataagtagactaaactctggagggttcggtgaagggtcgtgggagtctgtgaacttctattaggtgttgtgactgggaaaggctttctcgggaagatgagaaagcagttcaccaccgagagatgggacgcaggtttcaggcatggggagccgtgtgttctagggtcctgagatgccgatgcacttgatctgttgcaggaagaaggccagggtggttggagcatagtgaactcggggagccaagggggctgacctgagaatcgggcggatgcctcataacgctaagagctctcattgtctttattagaagccgctggggagcacagtgccctggcctacgtttttttttttttttttttgagaggcagagtctcgctctgttgcccaggctggagtgcagtggcgcgatctcggctcactgcaagctctgcctcctgggttcacgcccttctcctgcctcagcctcccgagtagctgggactacaggcacccgccaccacgcccggctaatttttgtattttttagtagagacggggtttcactgtgttaggcaggatggtctcgatctcttgacctcatgatccgcctgcctcggcctcccaaagtgctgggattacatgcgtgagccactgtgccgggcctccctggcctacgttttaaggtcccgctaactgccatggattgaaggaggacagacatggatgtgagacctctggcagcctcttgcctttaggcgagagcttcctgctgagacacacagtagcctggacagaggtagagatggtgaagggtgggtggatggcaggtgcgtcttggaggtagagctgatagaacttgtagggaacttgaatgttccctgccattggtggagcttttgtctaattggagagaagctcttgagtaatccaccgacagatggaagactgcaggcctggggtgagtcacagagcggggacagccttgatcctgttggcctgtgataagtgatggtggattggactgcactgtggcaggttgaggaaggcttgcttcgggaggtgactgctgaactaaggtctaagagtggacaggtatcaaggacttgacaagggctagaaggattggggcagacaggaagagcagctggtgcagaccagggccagaagggctcatgcaggcaggaggagcagcgggtttgaagaaacgagagtgctgatgctgtgggccaggcaggacatgggggccacttgcaccacagtggtagcgaagcgggtggagagaagtgaacggactcaacagagatgaaaggcacaatggagatggattagatacggagcagggggagtggaaggcattgaggagactccggggtttcaggcctatggactgattgggtagcagtgccatctctgagacaggagtattagcttgatccagtgttatgagtttaaaaatgctaccaagctaggcatggtggcctgtgtctataatcttagctatctggaggctgaggtgggagaattgcctgagcccaggagtccagcctgggcaacatagtgaaaccctgtctttaaaaaaaattaatgaatgagctaaaatgctacttggcagaaaaattgtgtaactaaagatgaccctatttcttctcattgcctatttctccccctaatccttgccgttactgtcctaatggcttgaggtaatatatctgtagggtcttaagtaacttgttgattgaatatttacgtatggagattttcctttttctcccaaggtggagaatgatatttatggttagataccatctcaagtttataatcgtttggtctaattttttttttttttttttgagacggtctcactctatttcccaggctagagtgcagtggcaagatctcggctcactgcaacctctgcctcctgggttcaggcgattcttatgcctcagcctcccgagtagctgggattacaggcacctgccatcatgcccggctaatttttgtatttttggtagagatggggtttcaccatgttggccaggatggtctcaaacccctgacctcaagtgatccgcctggctcggcctcccaaagtgctgggattataggctcgagccaccatgccaggccttggtctaaaatttttttattttttatcttttttgagacagagtttcgctcttgttgcccaggctggagtgcaatggcgtgatcttggctcactacaacctccacctcccgggttcaaatgactctcctgcctcagcctcccgagtagctgggattacaggcgcccaccaccacgccctgctgttttttgtatttttagtagagacagggtttcaccatgttggccaggctggttttgaactcctgaccttgtgatccgcctaccttggcctcctgaagtgctgggattacaggcgtgagccactacgcctggctggtctaaaatttttaatgttacttttttttttccctcccaggctggagtgtagcggcataaccttggctcactgcagcctcgacctcctggactcaagcaatcctcccacctcagccacccaaatagctgggcctacgggcatgcactaccacacctggctaatttttatattttttttgtagagatgagatttcaccatctttcccaggctgatctcaaactcctgggctcaagccatctgcctgcctcagcctcccaatgtgctaggattacaggcatgtgccactatgaccagcaatattaccttttaagattaattttgaacacaacaatttaaaaaaaataggctggggctgggtgcagtggctcatgcctgtaatcccggcactttgggaggctgaggcagacagatcacttgaggtcagaagtgctagaccaggctgaccaacatggtgaaaccctgtctctactagaaatataaatagtaaccaggcgtggtgacacatacctgtaatcccagctactcgggaggctgaggcaggagaatcgcttgaacccgggaggtggaggttgcagtgagcagagatcgcaccactgcactccagcctgggcaacagagcaagactccatctcaaaaaacaaaaaataggccaggcaccatggctgatgcctgtagtcccaacactttgagaggctgaggcgggcagatcacttgagactaggagtttgagaccagcctggccaacatggcaaaaccccatctctactaaaaatataaaaattagctgagtgtgatagcacacacctgtaatctcagccacctaggacgcggaagcacaagaattgcttgtaaccaggaggcagaggttccagtgacccgaagtcacaccacccactccagcctgggtgacagaacaagactgtctcaaaaaaaaattgtagaaatgtcccaaatcagatttcatttattcaatttcagttgaacacatatagtcttctaattaaaaaaaaaatctagagcaagatcattagctttttcaaacaatttctagttcaacttgcacatgtttgtatctgattgccaagtgctgaagtctgagtgatctcacatgtgaagaagatgccttctggaaacctcataatcatgtgccgcggtaactaaacaagcacccggtgtgctgtccatttgttcttgctcggcaagtcaaattaaggctgaggtgcagtctccacatacagcagcagttatgtctttctcccattttattggtggtttttcataatagcgtgcctgtttaacttgatcatctaccgagccatagggaaattgcacatcccacatctgccgattccttaatcttcttgagcctttgttatcatctgtaaagagggggagacgatatttaacaatcgggtgcctcgtagtgtgactgcgaagagcaaatctgagatctctgtaaggcacttacagtacctagaacatagttctcagtaaatatctaatgggactcttgtatcccatatactctgttggtgccgtacagattttgtaggggctgatgtcaccatgtcagcaagggatttgaactttagagaattgagttttctcaccaagtcatgtagagcagggatcccttctaacggaagcccatcctctcccactctgctctcttgccttttgacacgtgtgacattttatctaaacaaattttgtgaccttcctgaacaaaacaggttgttttaggatgggccagtgtttctggacacctgtactgttcaacacttgcactgtctaagaacatacgctgatattcatgtcatttacccatccagcccctgttggtgggaagctgctatgtgtgtacagaatgactaaaccagacttttttatttgaccctgtttgctacaaacgtaattgaataattggggcctggcagatcggaagcaataggaacaatatatttcaatccagtactctgtgagcagcagcatttcacagagccagaaataatttagcctgtagagcttattaagaagtgcaatgttcgttatgcgtaacttcagttctgttagagccaagaaaataaaagtcaaggctgaaatataaggaaatgaataagatacatggaggctggtgagatctggaataaaaaaaatatttacataggagttcagctttgattttatattgtcacaaattggtaccagatgcctgcatttcagacagactcctgagctgatcccagagtgtgagttgggaaacaaatcactttgccatttggaaggctgattgatattttaggagtttctttttgttttcaaagggaaaataatgcatattatagacctagcaaacagaacttttgtaaatggcaattaacagaagatgcccaagtgaggaagtctccagtttctttttataaccctggcaaaagtaatggaggtgacattttattagcattggcatctcccgcttacaatgggagctagttcagccttgttgagccgtgtccagagctggtagcttcatttccattttccttcaacctcagggagaaacacaagggtatttctgtctggggcggcaggacctcatgtggtctccacgtggcaggatcctagaatcacggggtggcagtacatattttcccctatggctttaagaaaatggcttttcattttgagtcttaggtttggtctcaacagtgcttgcttagcctccaggccatttttcttcctggtgtttgaatgactcataaaatgagtttggagtggtctgaagcctctgcctccttccttgaatgctttctaagaggggctgccatgcaagaatatatgctgattttcccatgtaagttgtcagaggatcgcctgggtgacccagagagctgagtctgtttttttggctcccccctttggatgctgacggtctttgttggaaattgatctctgaggctcagcctggaaaagcgggatgtcagtcctgatgtgggccagcagcgggggctggagggtggtgtgaatggcatgaggtcatctggaacagagggggggctccatggagggtcctccagcccccaagaccagccttggtatttcctacaggggctgggccataggctctcacatggataagaaggaacctcggaggccctgggaggtgagcctgccgtgtgcttctgagctccatagaccttggatggagggacgagagcccttgtctctgttctctgggttgatgctggccaaaggctgcttggctgtgaaagggagggagacctggaggcccagcgggcaccaagattgtgtgtttcctgtttcgcttcaggaccctggacgtcagtgcctgtgctttgtcctcctatagtagctgcctctactcggagggagtgaattttcattatacaacttttagctaatatagtcaaatctcattacccccagtagtttgttttataaagttgctgcaagcactgaattaggaaatactgatccattgctccggaggcaaatacatgggtagctatgttcctgtgagcctctggtcacacgtttccgtcatctgatcaatgtataccttgtcctaggtgcatttccatttaaagacacctaatttaatatatattattgactcttcattgacagcggcattgtaacacattcctgaataaggcttcttgaacatgttttttctctgtaaggcacactgcagcctgcttctgcttaggaatgctagacagcacttcagcactgtgcttgggacccttttaaacagtgaaatcaccagcaaaaagcacaaaaatgcaaaaaatatggcactaaaaatgctaagaaaaagacaagaatgagctgagagaaggcatgtagccttggtcacctcaactaggaatctgtgtgttgggtgactcaaattttttgccactttgtacacactcatgtcagcgaaataaccatgaaagtgccatgagtgtccattttggggttacaaataaattttagcaagtaggactggactcggtggctcacacctgtaatcccagcactctgggaggccaaggcaggaggatcacttgagcgtgggagttggagaccagcctgggcagtatggcttaaccccatctctgttttatttagaaatacatatatatgttaaaaataatttagcaggtcggcaagtctgcaaatatagaacctggggataatgaggatcagctgtactttatccaggtagtaaaggcgggggggcggtggcttctctagattgaggggtcctggaaagaatctgctttctcttttacaaaggcctgcctcagcccatctcacttattcctcatacccttgaggtgggaagggctggctttctgtcctcttccctgttgatcaggaagccaagaatcagagagccagtgtgacccaggcatatggcagaaggaaagtggaatatttcaggctctgaaggcctcttccttctcaccaggctgtgctggcaagataggaagagtgccttaaatgatggaatttaaatgctgacatcatattttaataccatttaaaaagaaatattattatctcttcttaataatttctatatgatttaattagatgaaaatcagcatagtagccaggcatagtgacacgtgcttatagtcccagctactctgaaagctgaggtgggaggatcactgtactccaacctgggcaacagagcgagaccctgtctaaaaaaataaaataaaatagactgcagcataggatggtgatttggagtgtaaatcctggagccagactgcccaggtttgaatcctggctttgctattctccacgttgggcaatttataaataaagtaaaacatttccgatccttggtttccttaattgtaaataaaaatagtaataacagccaggttcagtggcttatgcctgtaatcccggcactttgggaggctgaggcaggtggatcacttgagcccaggagtttgagaccagcctgggcaacatgggaagaccccatctctattaaaaaaaaaaaaaaaaaaacaaacccacaaaatttagctgggtgtagtggtgtgctgctgtagtcccagctactctggaggctgaagcaggaggattgcttgagcctggcaggtcaaggctacagtgagctgtgtttgcatcactgcattccaccctgggcatcagagcaagaccctgtctcaaaaaatgataataacaccaaacatctgaggttaatatgagacttaatgaatttatatttagtgcttgaatccatgcccggcaccctgtagcgtgtagaccttctgtgtgtttcaaccatggttttcatttagtgtgatcagtacttgggaaatgcatgttgaggccatcagtgatgaccccaaataaattaggaaaatatatagtacggttgtcattgcatcgtacacagccagtaagggattttgtaattttccagttcttttcatctgtttaggttacatagtttgggcctggaaagtgttttggagctttatttatccagtttaactgtcagcagtgagcagattaaacagacctttgtcagagtctgtgtcatttttgatgagtagaccgctaagccaatgaacagatatttgtgggcacctattgggttgaatagtccctgcctcgaacgtgtgaggatttaaggaacagaaaatgagatgtaaagagatgccgcaaagcagcgtaattgggtgaagagcaaatgatcatgccacccctgtagcactatctcaacagccactaaagtgtatttaaaactgcccatttcccttcctttccttctgctacctagcatctggtagagatgctagcaaacgtcatgtgccccactgggttggtgtttgtttgcttgtttttgagacagggtatcgttcagttgcccaggcttgagtgcagggcgcgatctcggctcactgtaaccgccacctcttgagttcaagcgattctcctgcctcaggctcctgagtagctgggattacaggggcacaccaccacgcccggttaattttgtatttctagtagagaaagggtttcgccatgttggccaggctgctctcgaactcctggcctcaagtaatccacccgccttggcctcccaaagttttgggattacaggcgtgagccactgcacccggcctggtcagggtcttagaatcttctaggctgggagtgggaggtggagcggttgttctgttactttcttacaaaaaaattgcagcccagagttcctatgagtatttgccctgttgtcttcatattaagctttgcttcgcctaagctgcttgcactgataatgtaagcttgctgaagtgctgttgttagaaaactcctgttttcttgagagagaaaggcacctttcctataaacaagtgttttgtgacatgttttaagtggaccttttaccctagatggtgttttctaccatataaactttttgtcagtgaacaagtgattctttcttctgtgtctgtgttgattctgcccgaggcgacgggacgagatacactgctaaatagattccagtcagatgatcccaaccgtgtgagcttataaaagacagctgttaaagtttaaaattaataattaacacacacgcacagacaaaagttgttgctcctagcaagattaaaattagtctgctgttgcagaagctctttatatcttcctcaaaagaattttattgttgtgtattttttcccatttcatctaaagataaaaatttaggtagagaaaatgataaattgattttctttctttttttttttttaaacttgttggcaagttacaccgttaaggtggtagggctcttgtctctccgaagaatcataagtaacacttgtctatggctactttgaaattacctaaataagataaaattatccaaataagataaaattatcccaagcaagaacttttttttttttttttgagatggagtttcactctgtcacccaggttggagtgcagtggcgcgatctccactcactgcaacctccgcctcccaggttcaagcgattctcctgcctcagcctcccgagtagctgggattacaggcgcccgccaccacacccggctgattttttgtatttttagtagagatggggtttcactatgttggccaggctggtctcaaactcctgatctgcccacctcagcctcccaaagtgctgggattacaggcgtgagccaccgcgcctagccgtgttggttttcaaatagctattttggtaggtgatggattagtagagtcttgaatttagcaatggaaaacacataggcagtttgtcttctgcaaggctctgccctgcaggtgcagtgccgggcacatggtatacagagggtagaccctgtgtgcagcgcctgcctcacggcccgcctattagtccagggtcccttcctgaagggaccttgagcatgtctgttgtttgaggttattacagcagaaagcctggcctggtgggaggtgatcgtggtcattctcccctaaactgttccctgatgtactttgcaggagtccacatgttctggtctttattgtgagactcccctgtgtgggaggggtttttaaataaaaactggcctacagactgtgatcaaagtctcactctgaaaatgtcaaaaacaggctgggtatggtggctcatgcctgtaatcccagcactttgggaggccaaggcgggcagatcacttgaggtcaggagtttgagaccaccctggacgacatagtgaaagcccgtctctactaaaatacaaaaattagccaggcgtggtttcacatgcctgtagtcccagctactcgagaggctagggtacaagaatcgcttgaacctaggaggcaaaggttgcagtgagccaagatcacaccattgcactccagcctgggtgacactgacacagtgagactcaaaaaaaagagagaagaaaatgtgaaaacaactgggtatggtggcttacacctgtaatcccagtgctttgggaggcccaggaggaaggatcacttgagccaggagtttgaggatgcagtgagctatgatcatcagcactgcactccagcctgggtgacagaggggagactctgtctctcaaaataaatgaataaagtgagagaggaagagaaagaaagaaaatattaaaaaacaactctctttatcatgtcttgcctttctatcttcttctaaaacactttactggtgttttgtgggtgctgtgttccagaaagagtgtatctaaattacagttgtgttaaaagtgagtgacaattaaaaagtagtgaatcaagtcatctgtaatcacatcactgatgaattttggtgcactgactcccagggtgggctccctctttcttgcatccatccctcccatagttcttgaacacatactgtgtgaccaacactggaccaaggcacacgagatgaacatcagctgtgttcccatggagtttgaggcctaacatacgtatgtatctgcatttatgtatacttcttttaaaaatgataatcggggccgggtgcagtggctcatgcccgtaatcccagcactttgggaggccgaggagggtggatcacaaggtcaggagatcgagaccatcctggctaacatggtgaaaccccgtctctactaaaaatccaaaaaaaaaaaaaaaaaaaaagccaggtgtggtggtgggcacctgtagtcccagctactcaggaggctgcggcaagagaatggggtgaacccgggaggcggagcttgcagtgagccaggattgtgccactgcactccagcctgggtggacagagcaagactccgtctcaaaaaaaaaaaagcgggtggatcacctgaggtcaagagtttgagaccagcctgaccaacatggcgaagccctgtctctactaaatgcaaaaaattagctgggcatggtgtcgtgcacctgcaatcccagctacttgggaggctgaggcaggggaatcgcttgaactcgggaggcagatgttgcagtgagccgagactgcaccattgcactccagcctgggcgacaagcacaaaaccctgtctcaaaaaaaaaacaacaaagagaatcatgctttacaggtgtttatgaattgtttctttttcacataaggcataaaggcctacaattttaaagtaccaagaaaacttcaagaaattgttcgtaagaaagtttttctagtatagaataaaatgctgtgttctctttaaccaagacattcattattagcttagacagccagttgcttgatgtcctgatatccttttataaacctaggcagctgaagggaggcataaatctgacagtacctgaccgtgtttttcattcagttcattctttcgggagatgtttatcaagcatacaccatgtgcaagggggtgagtatagagggttgaaccaaatatccttggttttcaccttaagggaacttacagtccttgtaggtgacaaacaaaaatatgggtaaagttgggttaagtgccgtggaagaaaagaacgtgtatttcaaaagaacaacagaggaggagagaacaagcaggtgaagtcaaggaaggcttcttggaggtggtgtcttaggctgccagaggagaagccaccagcacctgagaagtgggtaggaaggagttccaggtagaggtaactgcgacgtgttccaaggccatgtggtgtaagagtccctttggggaggaagccagtgtggccgaggagtataagcagcgggaagagggaagcaaagctgttcatgtcctgtggacttcatccaagggtttgtatttcgtagttcaatgagaagatagtgggtttgagggacagagcaacaagttagagttagctcactctggctgctcaggagaccaggcaggagagacgatggcagcttgggctggtgggcaggtatgtgaaggattaaggtgtatttcagaaatagacaacagtccttggtgatggactgaaggtggctgtgttgtggggtgcagggtggtgctaaaaggactcctgggtttgtgacttggcttcttggagatcactggtaccatggagatggggcagtttgaagggggctggcttaatatggaggaggaggaggaagaagaagaggttgagtttggcagtgaagtttgagctgcctgtgaggatgccacgtggagatttaaggaaggcacttggctatgtgggatcctggagcttcagagcaaggcggattggaaaaacaggtttaggcatcatcagtatgtagatgatgttcaaagccaaaggtgaggaggaaatcacccagggagcggggacagagagatgagaaaagtccaacctggagggtcttccgtatcgagaggttgagtagaagagcacctagcaacaaaaccaggacagggtagcctggatgtgggaggagaagcaggcacagggtgctgtcagggaagcctggggggctgagagaaaggatggaagaggggctggggagaggattggaggagagagaagaaaggatgagtagcattttgggagcatggacagagagtggatacagaaatatagcaggctggcaggcactgaggagtggccatctttaactggtgagcatggatttatagtgacatgaaactacttgactctgtggtcatttaacaccaggaagaggtttatggttatttagtggagggagttccttgaggctggaaccttccttccccgcatggaggagcgtggctctcccaaatagcttttgctgtgtaaatgtttttgttcattagtattttaaaagtaagagtttaaaaaatattaacatatataatctgtataatagcctataaggtaggccctgttatccccattctactgatgggcaaactgaggcacagacaggttatcgagcttatcaaaaatcccagcactgagaacttatgtgggttccaggatcaggttcctaactactgtgccatgctgtgcttaggactctgtggccacagtggtgatctttcatcacacccctttgtaaagaagtataattgtttcagaaacttaatgcagttcaaaatatcactttcccctgaagtatctaaaggctcttttattatgtagcatccagagacagcatcagtgattaatttcactttgcaagttaggattcacctagctctccgtagcctacagagtgttgtcatccggagccagtgtgttaatcttggttggtccctcctcgggtcgacgtgggccagtgcccatcatcacaaggcccgcagcctgaccctgatggtgtcctcccagggccccgccatcagcccccagtgtagggccacgtataggcacaccagccagtgtgttccttggtattttttttttaagtgtctgggcccatgttatcagttacacaggtggaaatgcaattcttttcctatgttaagtgtaaccaaagaccacactcccactgaaagacaggcatgatgtgatgtcaggaaaagggatttctgtgtgccagatattgctccatgcatctgcaaatcaaattgagcagagagtacagaccaccacactaaagctttttttttttttgcaggataattttttttaatttttaaaatttttgatgaaacatatcaaagcttatctttgatatgttgtgataaaacatataaaaatttatctcttaactattctttttttgtttgcttgagacaaagtctcgctttgtctcccaggctgaagtgcagtggcatgatcttggctcactgcaacctctgcctcctgggttccagtgattctcctgcctcagcctcctgagtagctgggattacaggctcataccaccatgcccagctaactttttgtagttttagtagagacagggttttaccatgctggccaggctggtctcgaactcctgaactcaggtgatctgcccacctcagcctcccaaagtgctgagattacaggcatgagccaccatgtccggccttaactattcttttaaccatttttttctcttcttttttagagacagggtcttactgtgcctcctgggctagagtgcagtggtgcgtgatcatagctcattgcagcttcaaactcctggactccagcaatcctcccaagtagctaggactgcaagtgcatgccaccacacccagctaattttttaattttaattttttatttttttatagagacaggggtctcactatgttgcttaggctggtctcaagctcctggcctcaagcagttctcccatcttggcctctgaaagcactgagattacaaggtgtaagccactgtgactggcccttttaaccattttaagtgtacagttcatagtgttgaatacattcacattgttctgcatccactctccggaacccttttcatcttgcaaaactgaaactctgtgcgggttaaatagccccctgttcctcctgcccccccagtccctggcaaccaccattctgctttctattgctatgaatttgactactggaggtacctcatctaagtggaatcacagagtttgtccttttgtaactggcttatttcacttagcataatgtccttcatatggtagcacacatctgaatgtcctttctaaggctgaatattatcccattatctgtatatgcaaaactttgcttattcgttcattcttcgatggacacttggttgcttccacttttcagctcttgtgaatgatgccgctatgagcatagatgcacagtgtgctaaaactcgtcctctcctcccccatctatcagaaagcgatctctcatgtaggggtgagttacaaagggaaagggatggctgacttgaatgcagtgattccttcatcaaacatgatgcctggacactcccatttcaagggaaatgagtgatcttctgtgcgcagaaaagcagcagttctagcagggtgtgggtgtgcaggcaaggaccaagaagttactaaatcgcaagtagtcatcttattaatcttttattgtttcatggccttctacctattatgttcaatgatgttgtcaactgtttctttaatactaaccagaataccataacagtatacatatatatgtatttatatctctatgtataatatgaatgcaatttttttttttttttgagacagagtttcactctcgttgcccaggctggagtgcaatggggcaatcttggcttactgcaacctccgcctcttgggttcaagtgattctcctgcctcagccctcccaagtagctgggactacaggcacccaccaccatgcctggctatttttgtatttttagtgtgagactgggtttcactatgttggccaggctggtcttgagctcctgaccttaggtgatctgcccaccttggcctcccaaagtgttgggattacaggcgtgagccaccgctcctggccaacatttttttaaactatgtatttttttctttctctggtaacaaaaaggaatacttgcatgaaacatttaggaaaaataacagagaaattcaaattacgcataaacctatcacccagagatgaccagttaatgttttagtgtaggacacgcacacacaggtgggttaggttctgtcagttataattttttgtgccgtatatatacatatttagtgttcttaaaattagagatcaaacagcatgtactatgttatcagtgtcgtttcttcactaactcatacattgtgagcatcctcccttgtcgtcagaccccattcagcaggtggccatgagtgcagagtgctccattcataagagcagacggaattcccagggtggctcctcatcagaagttggggtgtcttgcagtttctgtgatgcgcgtgatttctctgctgaaggttgtaacagaggaggaagggtggcatttcccccgttttatagcaaaacaagcaaggagtggaagccagctctgaacaacttaaccaggatgaggggaagctggaaatagcaaccggatcactcactcactgccttgtgcttcattcacttgataaaactaatctcaagatcatcatcagcggaaattatttcccctaatctcctgggagtgtgctttaatatttttatgtttgcttaatggttatttcaattctgcatctttttttattaaatttaaaaaaaaaatgaaaactttccaggctgctttgggagacttcctggatttttcctcatgtggctggaggaactcggcccctcacgctcttcacctcccccagtggagaatgatcaggctccctagggtccagctacaggccagttttttcaaaagctgtttggaaattcaaggtctgtttcaccacatgcctctttttgcagtttcattagctcattcaaaatatactgtaaaaggctaacaagatgtcatccatatggaaatcatattagttagattctgttgcttctaatttctgtggtgttgattaggtgctaattattttgggggattggggggagtaccttgtgctttggtttgttcagacattcagcagcatttactgtgcacctaatatgagttacagccctggacctagggagctctaaatcaagagggagagccagacaagaaaatccacctgacagtaccaggctgcaacagagtgaagcccgggaggccatgggagcaaggaggggtctgtgagcagggaggggtgggtgggaagcggtggttccaagccaggcttgctgcaggtcgttgggggcctcggcaggtagctctgcctcattggagggaaggggcagatgtttgggggaggggccctagattggcatggaaggagacagggcatgcaggcgctcgcgcccttcggttcatgcacacgcttaaatgcagcagtcaggttgctgtaactccatggagctgagctgacggctctcaaggtgatgccagcagctgtgtgggcaggactggtgggaactcccgggactgaccctactcctttcatgctggaggcccctcagggcgatctgagggcaactccaaccccagggcagctgatggggtggacactagtttgccctttcagagtagggaaaaagcaggtgtggaatttgcacacccatgttcatggcaaccttagtcacaatagccaaaaggtgggagcagtctaaagtattcactgaggaatgaatggatacacgaaaatgacgtatacacccttaacggagtatgatttagccttaaaaaggaaagaaattctgacacatgcagcaacgcagatgaaccttggaaacctgctgagtgaaacaagccagtaacaggacaaacagtgtgtgcctccacttctgtgagtggaatctgctcgaatagtcaaattcatagagacagaaagtagaataatggctgctgggggtgagggcaggggaaaatggggagtattcttcactaggtgcagagtttcagcctgggatgatgaagtcgtctggaggtggataatggtgatggctgtccaacaatgtaaatgcagtcaatgccactaagttgtatactcttaaaatggtagatttatgctatgtatcttttaccattttaataaaaaacaaaaacagggcatggagcaaagctgcgtcccaggctagggtggacgtggagcctggcagaagggtcctgcggccattccacttccttccctccggagctactcaggcctgttaagctcctcgctccatgtccctgctgatgaggccctgggtgctggagaagagcaatcagacctgtgtgagtgcccatttgtactaatagggaaccttgcagaattcttctaagtgtcagaggcatttgagccagagcagctccttcttaaataggagctgggtaaaatgaggctgagacctactgggctgcattcccagatggttaaggcattctaaatcacaggacgaggtaggaggtcagcacaagacacaggtcagaaagaccttgctgataaaacaggttacagtaaaaaagtcggctaaatcccaccaaaaccaaaatggccactagagtgacctctggtcatcctcactgctacactcccaccagcgccatgacagtttacagatgccgtggcaacgtcaggaagttaccctatatggtctaaaaggggaggcatgaataatccaccccttgtttagcatatcatcaagaaataaccataaaaatgggcaaccagcagccctcagggctgctctgtgtagggagtagtcattcttttgtttctttactttcttaataaacttgttttcactttctggaatcaccccgaattctttcttgcacgagatccaagaaccctctgttggggtctggatcaggactcttttccagtaatgtaagtatgcatgatatgttatgtccactaggtcccagccacctgaagacccgctattatggttaaacatatgacatgaaacaccagacatttcacagagaagtgcctggtctgtcagcaaagcagttatttcttatgttaatggtgccaagagggaagccccttcccccagctcaaccaaggcattaaacccaagtcattcctccccagtgggtaaaactttatttctttggcaagataactttcatttgaaaataaactttgaagctgtttgaagctaaaagagcttgctttctaacacagcagcagaaacggtgaaagagcctcacttcctttgaaacaagcttctggagacctcatcagaatttgaaaggctgtgggataggtgccctgttgcttgggatgaggggtctgaagtggtgtgtgtgagctgctgaggctctcctgaggttcctttgaaaacctcgtgtttcccgtaattggagtccgccactgtgtggggtcatgggcagccggagggcaggtggctcatgcttgcctggacttggtgggagctgtagccgcgtgggagggggtaggattgcccagcaatgccctatccctctcagctccccctgctctggaagggcagagatgccagactgctgtccttctaagagcgggacctcagaatgtctagcagagacgttgttatccatatcttccatcccccggccatgtggatgtacatattgtgttggaacctcagtttctccatctgcaaaaggagtcagcatagtactcatgtacaagggtgttgtgagaatgccaagatgtttgtaaagcccttagcagagtgcatggcgcaaattgttcccaaaaggaaatataaacatgtaacaagggcctgcctgtttttgacgtggcctgttgtccttcctaagagccttcgtgctgtgcgaaggaatgtctgaccacacacagaacagagtccccttccatccacacctgccctctggcttctggagggtttggtagcagggttgcttctgagcttgacgtgtttctgggttccaagaccacacaccctagccatctccagcagcgtgtgcatgggcgttgggtccatttatgccccttatgctttttattggtctcatagcagaagccagactgctggggttttatgaacccaggaaaatgggctcttgatgactatgaggcattacatctcagagccaatttcatagtcgcagttcagcctcagaatgagcttttcacctcctgattcttgacagcttcagcttcaaagggcgttgtgaaagtctgctttggaaagaataggttaagactgacttcccacagtgttggctgcaaagaaggttgagggttgtttttttgttgtttttgtttttgtttttgagacagaggcttgctctatctcccaggctggagtgcagtagtgcaatcttggctcactgcaacctccgcctcccaggctccagcgattctggtgcctcagcctcccgagtagctgggactacaggcgtccgccaccacacttggctaattttttgtattgttagtagagatagcatttcactgtgttggccaggctggtctcgaactcctgacctcatgatccgcctgcctcggccttccaaagtgttgggattgtaggcgtgagccactgcgcccggcctgttctttcctttagagattaagttattggggagggagtgctaatgggtttcattaacgtgatctgtagatccaggccacatctccttcatggccctatcctgggtgggagtcctccattcttgttcccgtaacaccagtcagtgcgcctttgttttataatgaactcttagtgtgtctcctcaccggattgttcttaaaggcaaggcttttgctctagtcatcctggattccacggtgccttgtagtgggtgcttagcaaatgaagggtggatgactgaatgcatcaatgagtgagtttataatgtgacgagctctgtcccagagtgatggaggataaggaggggccatgtgccttgagccttgccatggtctgcaccattctcatcagccctgcttatccttagccatgcctcatgtcttggtaaagctttacaaagtctgttttgtaacactttttttctttttgataaagtggtggtatttctccttgagatctttaggaatctgcctgtttttcagagcaggacctcttctcttctttcatgttgctttgactgttgtctctctttttccaagacccctgccaccctctgataaccctcgcatctaacggagccacagagtccacagctgctcataggtcactcacccacgacttgcgtccttagaggaactctgcttccccgtgaccccatcagcctcacatccctgccaaaccaggcagctcagagcttgcctgcattccgagctctggcctgtgagtgttgaccaaagggttaacctttctgagctaccatgagccacctagaacagggaccaagccttatgtttcttttttcggttttatttgagacagagtctcacccaggctgaggtgtaatggcatgatcacagctcaccacagcctcgacctcacgggctcaagtgattctcccacatcagcctcctgagttgctgggactacaggcatgtgccaccacacctggctaactttttgtgtattttttgtagaggtgggattttgccatgttgcccaggctggaacattttcttttacttctttgtatctgtgacacctaggactgaatactcatatgtaggtaatgatagtgacagtgatgacaatgacatcttaacacggtagagacagagttggatctgaaccctgccctccctgttcctgtcgttacctctgctaacccatcctccatcctttgcattctcacagtggattctaatcttttcttgggatcatacactctgttttagataagaggggaaatggacacttacacacaccttgcatctgattttagaaggtccacagatccccaagaggtcgagagatcccagttgaaggatcttgctctaaagaaggacaccattaaacacccttaggaaaatcagtggtagtcaattgcatttattttacccagtcactttctgaaaactttggttgaaaaccatgtctcccctaccctccctagttgttaagaatatattattttccacagtaaccaaagctttggtataaagggtccattcagacctctgacatagacttttttgaagagtccaatagcagtggaatccacattgcatccaagtgaatattcacgtggctttaagcacagctctcatgctgcaaattcactttggaaagccttcctgaacagcctggtaattagaactgtggtggctaattaagaatacggtgaggcagatgcactaataatatatttccaagcgagctgttaaaaaattaaacttcctctgctaaggccgatggaagcacctcggattggggtattgtcttcccgtttggataactgaagtgcttgtgagttctcctgaaaactggatcaggctttttaaaagggagcaatttgcaaggatgtcttacgccaaaggttagggagatgggaggttatggaaatggaagtctcagagctccaaacggcaccttgatgtgtgcagtaaggaggtttcctttttggagagatggagagagagggtggatgaaatgtggctgtcagcaggtgctgagtgacacgcggctctgatgggtggctggggatggagcaccaggtagcctgtgctggagcatctgtcgatgtgctgagcgggccctgctctgggagggtttgcccaggtctctgccttcaagcctaacctgctgcctgctgcgcacagacacctgcgggacctctgtaacccacatttgaaaggaaagggaatggctctgaaatgacagtgtctggtccccagttcttgccctcccaaccatccagctcttccctggacatgtctgaacctctccaaagcttcagtaaaaggaaattgaaccagatccatagttttcaaattgtattatctggagctctaaggatcttagcaagggcttagcaggtctaaaaacagttctaatctgttgtatattttgggatttggtgcttcattattactgtatattttttcccaacatatgtttttctacatatgtaaactttatatatcatataaatattttaacagctttactaagatataatttgcataccaaccatttaaagttactattttggctgggcgcagtggctcatgcctgtaattccagcattctgggaggtcgaggtgggtggatcgcttgcgctcaagagttcaagactgtcctgggcaacatgtcaaaacctgtctttacagaaaatacaaaaattagccgggtgtgatatggcatgtgcctgtagtcccagctattgggaggccaaggtgggaggatcgcctgaacccaggagtcagaggttgcagtgagctgagatcgcaccactgcactccagcctgggtaatagagtgagattctgtctcgaaaaataaaaataaaaaataaagttattgttcagtggtttttagtacattcacaagcttgtgcagttgtcaccactatctaattttagaacattttcctcaccctcaaaaagaaatcccatggttattagcagtctcttcccattcctccccctctcggatcccagcttctggcaaccacgaatctattttctctctctatagacttgcctactctggacatttcatataagtagaatcatacacgacgtggtctctggtaactggctcctttggcttaacataatgttttcaaggttcatgttgtagcatgtatcagtacttcgttccttctcatggcagaataatactgcatttcattcattcatcacatttgggttttcacatttttgactattgtgaacagtgctgctgtgaacattgtatatgtctttgtgtggatgtatcttggcatctttctttgattatatttaggagtgggattgttggtcatatggggtgactctgtgtttaaaacttttttttttgagacagagtctcgctgtgtcgcccaggctggagtgcagtggcacgatctcagttcactgcaagctccacctcccgggttcacgccattctcctgcctcagcctcccgagtagctgggactacaggcacccaccaccacacccggctaatttttttgcatttttagtagagacaggatttcaccatgttagccaggatggtgtcgatctcctgacctcgtaatccgcccaccttggcctcccaaagtgctgggattacaggtgtgagcccaccgcgcccggcctgtgtttaacattttggaatataatttgtatgtatatacatgttacaccatatatatatatatatatatatatatatatatatatatatgttttttaaactgcagtaaaataaactcgatagctttctatagcaaagcctgacatactggtgacttatgcattaattaactaattatgcattagttaactcacgctgccgcctaagttgattttttgcagttacgcttcacctgccacatccgttaaattgaattgggccttgacatgtttaaaaatggttaccacaggcacccacttatctctttcaatggtgattatatccttactgtacaaccaagaccaaaagaaacaaattagattctgagattgaccttagactagaaatgtcactaagagcttctggttttagatttgtttgtacctcaaaacagctacactgctctaacagtgattgagatataagtcaatattatactctcaagtttataaaatgtataattgttctaatctgatttatattttgggatttggtgtaaggtttaatttgggagaaaaaagcactctgctgctcagaagtttgaacatcagtgttctagattatttctaaggtcctggctttcatttttgacctcattcctgggcttctgctggcttgccgaaggtcttggagtaaaaatggtaaaatgactacctggagctttttcttttctttctttctttttttgcattgcgtcttactttgtcacccaggctggagtgcagtggtgcaaatacagctcactgcagcctctacctcctgggatcaagtgatcctcctgcatgcgccaccacaccaagctaattttcatagtttttgtagaaatgggggttttgccatgttgcccaggctggtctcaaactcctgagctcaagccatctgcccaccttggcttcccaaagtctcagaatataggcatgagccactgctactggtcccctggagcttttaaggtacacccttgttcctcctgagccaaccctgtggagttgttcctgctatacttaaggatttattgagcacctcctatgtaccaggtaatgtgctaatcattgaaggggtttcaaagaaagaaagacatagttatttgtcctcaagatacctgctgtcaggttggagatgaataaatgtaaaaaaaaagaataaagtcaaccaatctacaagtatttagatatgaatatttccaaatgtaataaagataccaaatgttgtaggaattcagaaaatgtcagggacagcttcatagagcaggtggaggaaggtaggatttgggtggatgacgagagggtgaggcagattctgaattttcttttgaactgagatttggccacatttgggcattccttatgccagtggtccccaaccttttttggcatcagggacctgtttcctggaagacaatttttccatgcactgggggtggggggatggcttcgggatgaaactgttccacctgagatcattgggcattaaattcttaaaaggagtgtgcaacctagatccctcgagtgcacagttcacaataggcttggcgctcctgtgagaatctgatgccccgctgatctcacagtaggcagagcccaggcagtaatgcttgcttgcccgccacttgcctgctactgtgtggcccccattcctaataggccgtaagaccccagtactgtccatggcctggggcttggggacccctgccttatgccataaaccctttatttggaggccgtcaatttagctgtacccaatccccattcagcttccagtgaagagaataaacatgggtagccaaggagaagcaggcatttttttcagcaggcttccagaaaggaatctgaggtaattcggatagacaaggaagaggcatcagtctttgtttccataaaccactattgagtgtgggccacagttaacctgaaaaactcctagaaaataaggattcacaaagccccatcaatccgattttgctatagataattgcatgcagtttctgagctgtcaaaatccactcctgctgaaggcccttcagaacagaggaaggtcatgctggacaccaagggggagactccagggagcgttttactggcgtcctccctaggagggcagccctctgaagggtccggtaaacaccagcttggatgtgaggacccccgcctgagcccctgctggttctaatgaagttagctccgttctctcctgactgtggaggaagggacaggagtgtgtccctccagcaaggttcggttctccctcgccttcttcaaatcccacagagctaggcacagagggtccttgtcttgtgttcgaaggaaaaataaatgcgtatctggcttagaaagtcttcagcaggtaaaggcattcttccaaagcaccagtgagccctcacagtgactggggaggaagcgagacggctccagcacaggccattgtcaggctcggggccccgtcagaccaagtctcaggaacgagttctgctcagcctctgtctaaggaggtaactctggccccctgcaccacacacttgctcacccatgtaagccctgaagtgttcgtagccctgtacctcctgtgttcgggtgtgagactgaaaggtgctatgtgtgagcacatgtgtacacacacacacacacacacacacacacacacacacgttcattgtgctgtgataccagccccagccccgccggtctatgtgtggtcagcttgtccacttggctgttggggtctctgtccgggtcctcctggagccaagcctggccctctgattgcgagcctgtctgtctcctggttcccgctgggctcttttcctggggccggactttgctgggaggaattcttcctatgcctcaccgagtcccagttctgtcctgtcctgttgggctctgggaaggtgcatgtaggaagcccctcaggccccctgccatggcctgcctgctccctctgttagaggtactctcttctcctctcccaattaaaaccttggctctccctggctcccccatgtactccacacctggtttggcctccaggtgtggacacactccacagtatccttaaaccatgggaccaggtgctgcattcccagccaccctccttgcccggctcagggaagccctttgcagagaacgcctggatttgattccttggagcctgacgcccattcagaacataggtaagttggccgcaaactccttggacttagatgcatagggcgcatttctgtctagggtgaagctggcccttttatttctagtggttttccctttccaatattcccttcccacccatatcctgtcctggctgggcccccacttttcttccccaccccctccatgagtatccaatgtgttctgtagcaagatcaaagcggtttatctcatcagccacacaaaaccttttcggatcctgatttttttttttcaaccagtacccagtacctgcttctcctggttctacccttctgcgtattccattgtgtgcccctacagcagcagggcagggcccctccctctgggacgaggccaagtatgaattagaatgcagcactgccactgagccagcgaccctgggctggccgcctgatgtcctgataccctaaggctgtccagggaccctgggctggccgcctgatgtcctgataccctaaggctgtccagggaccctgggcatgtaccttcatggcggccaggtgtgctgtgtctgctgctgtgttctgaccttccctctagaccctttgtcaaaagagtttgaacttgttcccagggggtatcactggatcttcaagtagggactgacatgagggaaagagtgtttttcaagattagcaggacagcagtgggcagggtagactgggagatctttggggatgaatttctggccagctattaaatcctagcagcagttcctgtcagctctaaatagccccatataccaagataacctcacaccttgatttttcaggatttggcaagtctgatgagagcccttgaaacaaaagtaaactcaggcaagccaagagccttttgtattctctgtaaacatttagagagtcgctttcttgacccgcctatgaaaatgtagaaacagaccttatttgaacaagctgattggcaactctagtgtattgattttaatttggtttttgcctgattcatcagctggagactttaaaacatagccagattcaaaaccagtttcttggccgggcgtggtggctcacaccagtaatcccaacactttgggaggccgaggcgggccaattgcctgaagccaggagttcgagaccagcctggccaacacggtgaaaccctgtctctactaaaaatacaaaaattagtcgggtattgtggcgggtccctgtaatcccagctactcagggggctgaggcaggagaatcgcttgaacccaggaagcagaggttgcagtgagccgagatcgcgccactgcactccaccctgggagacagagactccgtctaaaaaaataaagaaaaaacggtttcttcccattgtgtctaatttaaaaaaatctaaccatccctccttttcttaaagataatcctgtcttccttcctttacaagaaaaatcccagtgactcccccaccccagggattttgaattcctttggtctgtattctggatatggatctggctttcagcgtgttagttgaggctcggggaggaggttttccttccaagccagctgtgtgcccagtgctcagaggtatggatggcatcaggctgactggtcaagaccaaatgctcctccagtcaccccagcctggtgacctggcccggccagtatgccactgtagtgtcagactctgtggctctcctcttggagttcctccagggtctaacaagcagctgctgccaggtgagcagtaagggccatgcttactttcatcggcacttttgctgctggacaaagctttagatccgtggacaacaaaacaaagcatgtgtctaatggatgtgtcctcaggctgaagggaaggccgttttgctttaagggtctgtgtatcttctgttaagaggtagcagctgacttttttttcttcatctgtgaacacgtgtactagggtgaaacagttttgttttgtttttgtttttatttttgttttttgttttttgagacggagtctcgctctgttgcccaggctggagtgcagtggcgcaatcttggctcactgcaagctccgcctcccgggttcaggccattctcctgcctcagccttctgagtagctgggactacaggcgcccgccaccacgcccggctaattttttttttaatttttagtagagactgggtttcgccgtgttagccaggatggtctcgatctcctgacctcgtgatccacccgcctcagcctcccaaagtgctaggattacaggcatgagccaccgcgcctggccaacagtttgttttttttaagtgagcgcagtctgattggacttctgctggaggagcatctggaatcttggcattgaagtttgccaactcacgaacaatgttatcatcacttatctgatgaatgtgaggagcaggctgatggtgctgtggcagtcaacagcttaagatgctgctagggaaatgaaggaaataacaatagggtgatggaggggcattttcctttaagagagcctagtatttgaaaaccagcatttcacaaatgacatacacatgatagtacaattcttgggcttatgtgtttacttatttatttgtagagacagggtctcactctgtcacccaggctagagtgcagtaatgcgatcataactcattgcaacctcgacttcctgtgttcaagcgtgcctcagcctcctgagtagctgagactgccggtgcatgccactaagcgcagctgattttaattcttgggtttatatatagtttttcattttagggctcctttaagtagtaggcttccatagtcaaacagttacaaactacagatttgtaccctactttttaggacaccttttctgcatgagctgaacaccatttcaagagcaaaagattatgtctgtggtggggggatggagggatgcaagaagcaggggatggaggcttccgcccagaaagtcagagattctgtaacaaaaaagggattttctagttgcctcaagggccaaccctgctttctaggctaatatgccccaagccttttcttgctgggtcctgattgggctccttgaggcttggtgactaagtcggtaaaggaggctagaacatgtaggttcccagagtctataaggttgaagtgggacttcttgctgtccagccctgactccttacccataacctccttgtcctggggcattgggaagctgaggaggatttctggactctgttgaccagactgggaatgcatgtattaaagaaagcggccctaggccagccgcggtgtaatcccagctcacgcctgtaatcccagcactttgggaggcctcggcgggtggatcacctgaggtcaggtgttcaggaccagactggccaacatggtgaaaccccatctctactaaaagtacaaaaaaattagccggatgtggtggtatgcgcctgtagtcccagctacttgggaggctgaggcaggagaattgcttgaacccgggaggtagaggttgtggtaagccaagatcacaccattgcactccagcctgggcaacaagagcaaagcttcgtctcaaaaaaaaaaaaaaaaaaaaaaaaaaaaaaagatgcccactaataattgtgtatagaaaagcattgaatggaaggtcagaaggtcaggtgctctctgggaaaagtccaggaatacccacctacctggtgaggggaatttgttcctgtattcagccagccatgattgagtacctgctgttggccaagcatggtcccttcctaggaacacacaggctgtgacagcatggcccctcccaagcagctcacttctagggtgtttccattttgtttgggagagggaggttggtgagtgagagaaagacataagtaccaaagcaaataatgacaagcttttgggtgtcttgtgactgtgttaataagttgtttctatgcttggggtttatttggtcataataactgtctggacagatgtgaagtaatcatgacctcagctccttcctcacctgtgtacttgaggtatccaagacactctcacctcttccacacctgtgaagaagcaactgtgccatccagtggcccagcgtgcagccaggaaggggggtacacccatggggaacactagagccattaaggaaattgccttttttgtgagtagagaggtggttggcccaggtatttacccaagtcgttttctgctctcagagctcatgttttgctctcagagaacacagaactggttcttcacacccatgtaatgtgcatatattatacatatcatccacctgtttatacttgaaagccttttggtcttttgcgggcctcagtgctccaggctaactagctctctttcttcttgcttgttgaaccttaaaagttcctcattcaaggataaaggagaccacctattatctggaggttggttatgatcatttccatcccaagtttgctgatgcaggaaagtaaggtaaataagtggaatgttaggagaaggttctcacccgcctttggcctgcacagaacactggagctattcaatgggactcaactgtacttctcactagaatcccccgggagtgtctaaaaccccgtttatccagccacacccggaccagtaaatcagaatctcaaggtgggctcaggctttggtgattttgttgctccctggggattctgatgtgcagacagcgttgagagcatcaatctacgctactttctcatttcatactggaagcagactgaggccaagggtcaccttccacgaagtgggctggtcctaactctcgggccagagctttcccctgggtgcccactgcctcacgttgtccttcggactgagctgctgccccaggtgactgcataggggattggccttgatcagcttgccccaccaggccccacgatgacactgctgcaccctcactggttggcagggacagcagtgaggcgctcacctgtctctcagcgctttcttcagggcactctgcttaccaggctcaggagagaggacacctccaacagagctgaggaaggtacctggaccacacacagctccattttgcctctcactttccggggtcctcagagtcgctgcaaatcaggatgacgacagagcattagtgaggagggccttcgggatggtcaggcctctgggcctgcgtcccctcatcagtgtggatggttggcctctcttcctggcctggaaataggtccaatgacccttttctgcataaaagtcactttagaaatactggccctcgggcctgcctctcccagtgctttgtcactccagccacaggttcttctgtgtactttctttcccctctcttcttccccaagtgacctttccttaagctttcagggtaagtgaacttattctaacagtacccttgtgaccagccctgcgtcccgggagtatacagtgatttgcacccacggaggaaccgttttcccttcatgatgagtggattaatttggtccacgtaggaatatccagatgtgcagtcgtgttgtcatggattatgacttccttgcttagcattccaaggatattgtaaaacaggcgtgggtgctttcaggaggctgccttacgcatgagcattaagcatgaactccaaagtgtggccagtgtggaaggatctaacttgtaactgtcagacaagtctgggagccctgagtgtacattcagtctgaagactagacatacacacttccatctgatgatgtcagtgcatattactcttgctttgaaccctgccagtctcttaccatatgtctacttggtcagcctgctattttggtccaaggctaagtgttctttgtcagtcattaaaatatgcaaagacctctgcttgttaagtctataatgataaggagtttgcatagtaatggacttaatttatgagggaaattacagagtgaaaagtggctgtttaagattggccgcccgccctgaggctttttgtttattacaggctttctggggttagaaggtgagggagaagacactacgacataccttgggaggatccagcaaggtgtgggggtggggcagagatgagcgctgctgagtgacactaccagttcacagggcaacccttgaggcagggaacaggtcctcatctttggctggaagggcaggcatcctttgctgtttgctggtaccacaggatggtttctttacagtgactggtggtagttccaagttctcttctttgtctcagaatatactggttggttccattcacaaagaagggaagtacatctgctgaagttaaaggaacaggtgggcatttgggcgtggattttttcccctttaaggagtcctgatcagaagtgcccatgcgtgctaatgtgtgcccttgcatactggcacgtgtgtgtgtgtgtgtgtgtgtgtgtgtgtgtgtaggtccgtctgagttcagacttctataatgaagtaccaaagactggatggcttataaacaatagaaatgtattttctcggccgggcatggtagctcatggctataatcccagcactttgggaggccgaggcaggcggatcacttgagaccagtagttcgagacctgcctggccaatgtggcgaaaccctgtctctactaaaaatacaaaaattagctgggtgtggtcgcgcgcacctgtaatcccagctactcgagaggctgaggcacaagaattgattgagcctgggaggcagaggttgcagtgagccaagattgtgccactgcactccatcctgggtgacagagcgagactctgtctcagaaaaaaataaataaataaaaagtaaagaaatgtattttctcacaggtctgaaggctaggtcactatctgggtgcgagcatggttggggtcagatgagggctcttccagttacagatgaccaacttgtagtgtcctcacatggcagaaagggagctagagagctctctggggtcccctttacaagggcactaatcccattcatgagggctccactcttatgacagatcacttcccacagaccccaccacctcatactatcacagtgggggttatgatttcaacacgtgaattttgaggggacacagatgtttaatctgtaataatgtgtgtgtgtgaattcacacctgttcagctcctgaggggaattaccgaatatgctgggttttagaaaaacccttataactgtaaagaaaggtatattctcatctggttcttttccaaatgagcctttctcgtttctggtgcaggaagaggtggctacggctttgtgagaggggagttattgggtcgtgtgcttttgtggatgggcctgattttctagggtgaaacacactggtggatgttggaggagtctgtgcttcctagcagggccttctgtgctcactgtgggactcagctggagtgttctccacaccacagccctgaaggacgcaggggcttcagagactgttaatgggacttcctggtggccgtcccatggatccccacgtgactctcagcccctgaggacaggaggcaagcctggttcagctgtgtgttcctgacagggctcacggtcacattgttgagtgggtgggggtggatgcatggagaggtgaacctgcctgtctgggctctgggctctgccagagcctgggcagcatctgtgctgcccgaagagcccacccagggcctccccagggctccttagggtacctgaaggagggcagccttcagcccttcttctgcatgatcacctcacttgcctgggtgcagattgaacaaaacatcaattgcctatttactggtcacctgaaaatgctcttctacaaaggaaggccaaagtgtgacagaacgtgtcgagattctcaggatccgaagcctatacatttatttctgcctgtggaagttatccctaatgacaatttggatgtgcatacttaatttaagtaaatacttaaatgagtgttttactttggatttaaaagctcagagcatcatacagagataaacagtaaatcttttcatcactgccttctggctgtagggagacctgagagcagtgcaaggagacatgggggccactaattttataggtggccagcacatcagtgagtatgacttgtgcttctcagtgcaccccactgtgtacatgcacagagttagttgtgctttgaagtgggtataggtgtggaaggaacatgtacgcatcttgggtgggctcaggcacaaggcattttggggtgaccctgccactggcaaggccttgagtgggggccagagcctagagttgggacactcagcctgctcctggtcagctgagctggggtgcaggtcagggtgcagcctcagtgaaggaaactggagtgtcaatcaaaagcccagtagctcccattcattaagaactgccttgggcctgggacttcacatgtgtccctttctcagttaattgttgtttcccatttcatagatgaacaaactgagggtcaaggattaaggagcttgctttcttttctcttctttttttttttttttccccaagacggagttttgctcttgttgcccaggctggagtgcagtggcttgatctcggctcactgcaacctctgcctcctgggttcaagcgattctcctgcctcagcctcccgagtagctgggattacaagcatgcaccaccacacctggctaattttgtattttcagtagagatgggtcaccatgttggccatgctggtctcaaactcctgatctcaggtgatccacccacctcggcctcccaaagtgctgggattacaggtgtgagccaccatgcccagccggattaaggagctttctcagaccccacagcctttggaccccaggattgcaatttcagtgtctgattctaggccctaggcattctcctgtgtagaattacaccaccctggatgggtaacatggggtttctgctgctgagatctgcaatgggcagatgtgagtctcccccagtccagcctgggactcagcacctggagagaggctaggctcgctgcctgctttcctaggattaactgggatttcagagggctgtgtctcaacccatagcacaggcacttcagagctgcagctgcaagtgctgtcacaggggtctaggcaagctctgtcccctgagttacggggctgtgcggggaagtcctgtctactcatgaactggctacctgtaaaatcagttccccacctcctcagctcgcctctgcactgctctcaggtaagactggtgcctcctccatagctctggctgactcttagaaatctggcaatattactgaaatggaaattcactgttagttaattgcagagtgaaactacagtttctgtagaaagtccggtatgtcatgaacacagagggcgatgtgtgtgcttggttcacacacattgatgagtgaggagctgagagtgttctatgttctgctgttttacagttggagaagagacaaggaggctgtatgatgagtatttttttgagacggagtctcgctctgtctccaggctggagtccagtggcacgatctcagctcactgcaacctctgcctcccgggttcacgccattctcctgcctcagcctcccaagtagctgggactacaggcgcccgccaccacacccggctaatttttgtatttttagtaaagacagggtttcaccatgttggccaggatggtctcaaattccagacctcaggtgatcagcctgcctcggcctcccaaagtgctgggattacaggcgtgagccaccgtgcctggccacaagtattttttttttaaaggatttgagcatcaaaaaattatgaaaggtggaaaattgatgaagctgttgaatagtttgctacaaaaatgacctttctgattgtcttagaaaagccaaacaagccaaaggtatcagagtagttggtcagaaaaagtacacacaaaattagaaacaaaaacaaaaaaacaccaaaaagtcatttcattctttgttcattagggcaaattagaacatggttatgactgcatgttcctaggctatgttttgccaaatgtagtaaaaaatagacttatcttaatatttttagttccgttttaaggaacaacccaaactttttcaatccatccctgctccgccaaatcatttactatcaaatgatggtctttgttcaagtagatttatgtaaacttaccaccaccctaccctgctccctgtacctgatattcttagttaactaggacctgttcttatttcagcctagcaaaagaaactggtagactagagaggttttagcaggcagtttgcaattccttagcagcccagaagagttaatgttttgcgtaatcatgccatatatttattctttctacccggtctatgagaaactctcccaaaggaataatttttttcttgttcctagttgcttttgaaatcatggccatccagggagcataacctttttattgcatcctaatgattttgaagttgtttttaatagggtttcagatttaatatttatcagttaccgggttcaaatcagtgatagtggaatacttaacagtattagctaatgccttagaaaagctgcacacagcgctcaagttatcctgtatattacaagaggcaccttgtctttgtgtgtgtgtgtgtgtgtgtgtccttgggggaagtgtcagcatcaaaaggatcagtcacttccttaatcatcacaaagaggccctctaaccagggagaatgttcaggattcagccagcaagatgggcctggcgtgcagggtgggaacatggcagcctcttagagacagcttttgtctgatcttttcttaacggacttcatgtttttgttttagggtagttttagatttgcacaaatgtctgatcagttctgcaatgcagttttaactcccagattttttccttctttctgcagacggcgcctcatctcccagagatcttccttggagaccctggaagatattgaggagaacgcccctctccggaggtaattttctgtttcatttatgtatatgtaaacagtacaccatgacagccagagattgattttggttttttaacttcttgatctatagaattaaatttaaaaataaccatctgaactccagggactatgggacatctcctagtgtctaacccacctctgaagaccactagaactaaacaacgttaaatccaattaggtgttggagtagcccaatttgcatggagatttgggtgcttttctttccgtggcgcctcttcattttgtaaactgctgcttaatggaacaagagcccagcattgtcccggcctatcccccaggtgcagtcacacagtaggtacagtcctggacttcattctcagcaggaggggcaacaagaactcctcaggaggtaaccacgatgtcgctccctggctaggtgctgggaagcccaattaggatagttgtgagtgctctctggggtctgaaagtgttctgtttctcccttgggattagaagagtgcttgcaaggcgtctttttgggtgatggccattgctgagctgtgctgtgctgtgccggtgactgacaggttcctctcctctaacccagccaggccctcatggacgagagtgcactcaggtgtactgcacccccttccatcctcactgcagccctgagctgggtggggcagcatgtgggagtgagccaggaagatggggcacaggggcttcccggggactgcagggcaggcggcagcagggagggcatcgggaggaggtgagctcctgtggacttccatcagctcctcctcgaacccgcatctgcaccgtgcgtgccttggccaggccaggacttgggagcgcctggctcttccttctgagcctggcagggtgctgctgtaggagatggcctccccctggatctggctccttccccacctgaagcttcactcccagggcagagcccatgtctgtaggctccgcctgcatgaagaacagagggcagagtgagcacagacagcctggggtcagaggggaagtgtccggcaactgtgaactttgtcactgacatcatcccaaagagaaagggctgaatagtcccatctccacttttggagtctttttcaaagcgtgggtaacctccaggtgcctcctaggatgtgtggtatgtggctgtgtggcaaacgcggcctgggaacaagtgttactctgtgaggagcagttcagtgggagaaggccatttccctgcaggagtcatacagaaagctacgctgaaagtcaaatgagggagctggccttggtccacatactcagcgagcatgcaggagaggtgttcgcaggcgcactgagtggctggctttggtgttagagtgagtgacatcgcgatctgactgaggtgctccctcactcctgccacaggaaaatccatgaataacgttgagaagcccctggagtttcgagaggctactagaagccatggtccttggaacaacgtggccactgtgagccgaaggaaaccgggtgactcggggtaccggctacagagggctctcccctcttcaggaattcccaggcagggctgttgagcctcgggatgcagtgtccttgagtctcgaggtgtcgaggagaggctggaggaggacgtgggttctgcgttcctggttggtgcgctgtcacccctcttcacggaatccacccagactggtcctcagccttgtggtagcacaaatgaatgcagtaaaaatgcttgttggcctcaactgtgacttgtaccagcgttcacagaatactgcactgaacctcaaatcttgttattataaaattctaagaatgtcagaaatcagaagagttttagaaatcaagtgtttattccactaaaggacctttttttgatttaaaaaagttctcagccgggtgcagtggctcacacctatcatcctagcacttggggaggtggaggcaggaagattgcttagtctaggagttcaagaccagcctgggcaatgtagtgagacccccatgtctacaatcaatcagtcaacacaaaaatacataaataaataaggttctcatattggctgggcacggtggctcacacctgtaaccccagcactttgagaggttgaggcagaggggttgcttgaggttaggagtttgagatcatcctgggcaatgtagtgagaccccatctctacaaaaaaaaaaaaaaaaaaaaattaaccaggcacatggatgtgcacctgtagttccagctactcaggaggctgaggcgacaggatcgcttgaacccaggagttcaagacttaaatgagctatgctcaacactgcactctagcctggagtttcttaaaaaagaaaacttaaaaaaaagagaacttaaaaagcataactgttctcatatttacttagacattcacttattcctaggagttatattagcatgatgtagaagaagagacattagtttgagagcctgggaacctgagttcttagcctgactccaactgggtatgtagcattgtaaattgacttagtgtctctggggcctcagttttcccatctataaaatgggaagaccaattggctgatcgctgaagccttctctggtctgtgaaatggtaacaccaataatgatgctgaagtattttgggaactgtgggggtggaaggctattagcccaacttgcttttaagcttagcagaagaacaaatggctccaaggaatctattaaaccttttgcataattaagtatatcctgtaatcagtgctaacaagaaagagctaatctttcattaaattagtttttaatttaattctatgctaatttaattttgcatcacttaaaatgtatgtttttaaatggatgtttacacgctgttgcaggcggctgtgaaattaattcattcttcgcttaacctgccaacctgagcgcccggtattccagttccttggcaattgttgccaacgccacaattctcttaaagcatttcttagattccctggtgatttggttgaatgcttaaaaaaaaaaaaaaaaaaaaaaaaaaaaaaaaaaaggcaacacaacaaacagcttgcttaatgaagggctagattagtaaggtgtatgtgcagttagaattgggtgctgatatggaaataaaacatcttgttaagttaccctgttaaaagtcctactttcctctagcacatcgtggtttgttagtggatttcctgtatctacctgtaactccaagaactgagcatgcgtcatgagaggacttggactgagaagttttgcacctgcctagtggttacctggtgtccaaaaataaggagttaagccgtctctactagttgtcaagaaaaacctctatttgtttgcagcaaacgtggctgccatcggcacctgccctggttttccagactgggtggatggatgctggtggccgcagctgttaaagtgatcacagcctcagctccttcctttgctggtacagacagccacctgtggcccttttgtggctttccacttccagaagaaggctgaggaatctggggcccctctttctgcagagagcaactcaggccatccttcgtctgtgctggcgtcagtcccagcttcctgcagctgggaggtgggaggaaggagccagagtctgctgaggtggcaggatctgcgagccgcctgaacccgcacactgtctagctcttggcctgctgccctcagattgactggcccaggaagctctgctcctgggaaaggaagccagggaagtggtataaggatgcttctgaacccttggccctatctagaaaccactttatgctttcagggattctcctctttccagtgactccatgtttcaagaaccttctttgcgtgtgtgtgacaggtgggaactttgagtggcctgcagattcgagcagtcattctggaggaagaaatgaggctgtttggagttctgggtctgctctcagagagcaaaaggcagagtgaggccctatctccttgaaccttagccaattaaatctgggtttagtggcccaggcgcagtggctcacacctataatcccagcactttgggaggctgaggtgggaggattttggggctgcagtgagctatgatggcaccactgcattccagcctgggcgacagagcaaggccttgtctttctttttaaaaaattaaaaaatctgggtttggaggcctagagttgggtgggggagtgtcaatcccaaccccactctaacccctcctgaaagccacaggaagcatctactaaatgtcctcaaacagggttctgcaagcctttaaaagaatctttcttttttttttttttccagactgtgtctcactctgtcacccaggctggagcacagtggcacgatcttggctcattgcaacctcggcctcccgggttgaagcgattctcctgcctcagcctcctgagtagctgggattacaggcacctgccaccgcgccaggctgatttttgtatttttagtagagacggggtttcaccatattggccaggctggtctggaactcctgacctcagttgatccaccctcctcggcctcccaaagtgctgtgattacaggcgtgagccaccacgccccagcccagaatctttctttagagtcaagaatcaggtcacaggcacccatgtcccatggcaggagctggctcctgtggcctaggtcagaaaggtttttcggtagcaaaacccaaaatcgaaaagtcacagccccttttatctagaataaactgagactcttgtttgttgagcattttgcttttctgtcgttgtgattgtggttttgtaacttaaaatttgccaggtgaaaacactacacacaaataaggtctccttggcctatggtctattttgccagtcctatagtacaggcaaatgctatatactccagcaaaataaaaattttaaaaaaacttgaatccaagccattttagctcaacaaatgtttatttaaaatttatcttaaaaacaaaacaaaacaaaaacagcaactagttgggtctctgatttctcattcagtgtaaagctgtgacctcccaggcatagcaggtcaagttgaaacttaagacagctgtccaggtaattcaggccaaaatcttgttgcagaagaaaaatgattcaggcttgtttttgaactgaattttccgatgtttccctaccccctttaaatgtacagtttttggttcccttccccttcgttgatacagcaggattctttttaagacaacaataaagaataatgtctttggaatctgcataggtttttgttttttttaatgcaggggacaatattcttgattagttggctttttagagacccatgtaaaataataacagtattatcaagaagttgtctattattgggccttttttaagcttccttgcttccagccgtgttgtcttcattatcctcgcggactcctgcctgctttggggtgactcaagccatttgtctggtccttccttcctgtctttatgtggagacgtctcagctgtccagcaggcaactgactgtgtttttgaaatgactttatttttcagatgtcgaactctctcaggttcacccagaccaaagaattttaagaagattcattttatcaagaacatgcggcaacacgataccaggaatggcaggtactacattcacacagaagcggctgccagcaccagtgggtggagacagggactggaggaggggacagttttagtggccaaaactcagcaaacgcaagcccacacttttaagatgagcaggatctcatggaaccttccccgacaatttccaccccactcatgccagaatcaccaaaagcaatctgtagagaataatgaatgctctctaaggcgaagtgagatgtttagaacagaaacaaactgagtttttgagaacacatgaacggatttttatagaaacctttgaacagaaaaacagttgagttttggggagttttatttgtttatctgctttgttggttttgttttcgtttttcactaccactgtgtgctctggtcaataaatgccctcccagatatgcgcctgaacttagtttgggtcctggctttaactctctttttaggagagtagaatcattactttgctggcagattcttcctcagtgctgatcctgcttcctgggccagccaacatctggagtatgtgtttctccagctcttcagctgctcgtttggaaagcaccattaaataaaactggttgaaatttatatgaccgtgatattaaaaccttccagacaacagatagatcagaatcattgttgccagcatgctcatgattggatggctaagtccattcatctcagctccaatggtgcatggggacagagtccaagacctctggggtccctggtgctgtgtaacccttgggggcagttgctccccactgacttgaatgggtgagttagagacgccatccagagctgaggtcctgctgcagaagactctcttgtttgatctcctaatttatagaagaccatatgggccccactaatactctctaatccatacaaaatgaaaattgctaaaaagtcttttagttagactcattaaggcccagcatgactgtaagtcgcgagtaaagtaccctgtacagcctgtataataacccacaacaattacagtttttacaggctcattatcttgaagtttatgcctagttttaaagccttataaggacagggaacatgattttataacagttgcagtggtttcagaatagcaaaattgagctttccaaatgatttttacatcgtcagtatatgttcatattttaagtacaatgcttttagtttaaatttaccaagttatttgttaaatcgaatactctgaatttctctctctcaccctttttttcgctgacacttaagaattattgtgctttatttaaccattgctattgttttcttttgaggcttttacttacagaatacagagcttactcatgccattttagtgtaattatctaccattggtttacatttatgtttttgttcatgatctctttaaccgtaacataaatgtagaaagcctttaatttctcaatgaaatcaatgacaaagccaaaggaatgggtcaaggagtagtgttcccacctctgatgctagctggcacggcacaaagtcagacaattaccccagcatggttaggtagtgagaggatacagttaataaaagacttggattaatgagatttccaaagaacattacggagccaccttccccagcacactcttgacctaagagaacgtaaacagcaaagcccgcaattgctggcagttttgctggggagttttcagggggagccaagaggattcttagcttatctgaatatctgagaattggaatttagggcaggaaagaaagctctagggcctgtgtgggaaccgcaggctgtaggctgaggccacggcgggtcgtatgcccaggtgagagctggttttcttgtgcaaagggcagatgaaagggccggcaggaggggctggccctcccacttgaggtttattagcaaggagggattgtccttagacagatgaaagtgagagcctgggaggaagccaggaagaaaatacgatttctgaggtgacagaaggaaattgtagtcgagagctgatgaatgagaggacatgacccagcctttcgagagaggaatgcagaagctctgccccacagcatttgggcagcaggagcagaatctcctgctggaggcagccggggcgttgggtgagcccagtccctgaaatgacaggtaggaggggttctggtcatggtctcagagggagggacccctgtgctggcttaggggtctccgatccccccacctcagaaatgggaggtgagtgtgtggcacctgcacgttccccaaggcccctgcaggctccctccctgcttgcgcagcctcagtcacatctgtgcattgggctgtgcccagctcctgagtctccttgggacccctgatgagcacagcccaggctctcagtctgcgggccagatccacggctgatttgctcttctgaccctgaaaacgctggcatggaggctcccgcgtccccagacctgctgaccgtgtgatagaggccccagtattgaggaggatttggacttctcatctcagcaaggaccagagtgcagctcaagaaatgaacagggagcctctgttgtgatactcacgtctgacctaaccaagagtttcaagcacattttgagacagaaaggggaaaacatgcttttaaaactgagaaccagatataataaaagacaatacttgtggcattgaaaaaacaaaacaaaaaacttaaatatacctcgtgatcaatatcagagtagctgcttagaaataaaccttggggcctgagacagctccatgttcacccgtgaggaatcacttcaccctgtgacactggaccacaaatcccagccggcatgcaaagtggaagtgaacgccttccgcggaagtacgtggttgcgatggaggatggagtttgccttctgtaaaaactctcttcatctctctggcgtctgaattccgtgagtctggcattgggaccttctagagggcttggtgtgcagatacagtgcggaggagccaagctgagggtgctttggggtcatgctacaaatcgttgggccaggtggaggctaaggaggacagtgcccaacagatcgcagaccagccagatggagcggagggaatgtcagtaccactgctagaaccagagcgtggcaggagctcttggctggccctgctgggtgtttcgtctcctagcaggtagggaaagccatgagggatgctgctctcagcaacaattctgccttaacagagaaggcagaccagtcctcaggacctggagggaggtcatgttgtggacttcatagctggaaaagaacactggattttaggaacacggtcgcagaaagtttagactaagaagtagattcttctgggttggagcatatttccagaagagatgataaagttacaaggatgataagatggtaatagatgccttgattgtttgctgggtgccaggctctaagtttttaacatgcattgttttggaccaggcatggtggctcatgcctgtaatccgataactttgggaggctgaggcaagtggatcgcttgagctcagaagttcaagaccagcctgggcagcgtggtgaaaccccgtctctacaaaaaaaatacaaaaattaaccaggcacggtggcatgcgactgtggtcccagctattagggaggctgaggtgggaggattgcttgagtctgggggatggaggttgccgtgagccgagatcacaccactacactccagcctgggtgacagagcaaaccctgtctcaaaaacaaaaacccaaaatataaacatgctttgtttcattaactcaaaactcagtaggtgtttgtcaaataaatgagtagagatgccttttaaatgagtttgtcttcaggactagatctcgaggaatggaaagaatttagaaatacaaataatccttgaaacagcctgagtagggcattactgtctagtggcaggcagagtaatggccctcagagatatccacatcccatccccaggacctgttactgtgttaggttacatggcaaaggggaactgaggcgcaaataagctgacctttaaatgggagtttatcctggattatttaggtggccccagtgtagttacagagcccttaaaagcggaagaaggaggcaggatcgtcagtgtcaagagtgatgcaataggagaaagactcctctggctttgctggctttgaaggtagaggatggagccataaaccaagaaatgcaggcagctgctaagaatctggaaaaggcaagaaaaccaattctccctacagcctcccatgggaaccagctctgctaacacctcggttttagctccatgagtcccatttccaagttctgacctccagaattgtaagataatacatttgtgttgttttaagtcactaactttgtggcagttagttctgcaaccgtaggaaactaaaacattcatgatcccgagagtgggaagtagaattcacatccaggcatcagattgcaaagttcattgtctccattgacgagaatgtgggagatgaaaatccatatgcagtaagatagtgtgtcatggtggacttaaagaaaattccctcttgcattctgattttttaaaaatcattagcttaaggccaaggattaatttttaaaatggcttaagcaaacttacaagaatggggtgagggagactaaagtctagatgaactcgattgttaaaaagaaaataaagttggaactgtcatacattgctggtggaatataaaatggtgcagacaccgtgggaaagttgggtggttcttcaaaaagttaaacataaaattacgatacaattaattgctagttgtaattaattacctagcaattaattgctagttgtatacccagaagaattgaaataggtattcagacagatatttatacaccaatgcagtgttattcataatagctaataggtggaaacaaccccagtgtctcagcagatgcatggatagaccatgtgctgtatccatacaatggagtagtatttggccatgaaaaggaatcagtactgatacatgctacaatgtggatgaatcttgaaaataagctgagtgaaatgagccagtcacaaaaggtcaaatgtcatatgactccatttaattgaaatatccagaatagtccatagagacagaaggtggtaggtaagaggtaaccaggggttagggcaagagggaattattgcttaatgagtacagagtttctattaggggtgatggaaaagttttaggaatacacagtgatgatggttgcccaacattgtgcatgtacttaatgacactgaatagcacactgattagatggcattttatgttttatatatgtgtatatattttttcccacaataaaataaaacaccagtaatagccataggctattactattaagacaatggtcagaagcagaagggaaaggatggcgaatttcctgggatgatggtacgggttcagcagatgtcagctgctggcctgcttttaacttcctcaccaagtagaactggaagtgcagactctaaacaaagccacgtaccaggcacacagtaggcactcagcaagtgtttgttgaataaacagagaggccttttaagtgaattgtagtcatcagggctagatcctggagaatagaaagaatttggaaatacagatgatctttaaagtgccatggagaatgaatgaagttttaagtctgataccaagcaaagattgccttacagtggaaaaaagtgtgagggtaatgggagagggtagatttttttttttagatggagtctcactctgtctcccaggctgcagtgcagtggtgtgatctcggctcactgcaaactccgcctcctaggttcacaccattctcctgcctcagcctcccgagtagctgggactacaggcacccgccaccatgcccagctaatttttttatacttttttagtagagacggggtttcaccatgttagccaggaaggtctcgatctcctgaccttgtgatccgcccgccttggcctcccaaagtgctgggattacaggcgtgagccaccgtgcccggtcaggagagggtagattttaataatcatagactggcaagcctagagctgatgcttagcagtttgagaacagacggtttgtgtggaggttgctagcagtcaacgtgagttcactaagaaaatgtcatgtcccatcaacttcgactcctcattgatggaataacttagttaagtgaggaagtgccatggacattgcatatctagattgcggcaaaatgtcagtttattcctcactatcgcatgtccctgtggatagagcagtgagaagggccgggtgattgtgaagctggagtttctgcaggtggctgaaatttgtcagctgaccatcatcagcctgagggcgagtttgaatagaatagcatgtggtattcccgccagcgttatctcctgcagccagttatctcctgcagcatagatgagtgatttgagtgattggcgtaaaggcccagaagcctcgtagtcagccatgtggaaagctaaaagcagggagagcagaagcaggaaggagcattacagatgagaaccaagatgcagatacttcattcactggaaatgctagagccagtccactgagattaaactgagcaaggagaaatgtaattcaggtggactgctgattatagcgcaggatacagattttttagtacacatgaaaaataccttggcatttaggacagtgtgttccaccccaggctcacaatgcaatgccaatacagagggagctaatttagtttgtcctgatggaaggctagtatcacagaaggctggtgtcgcctttgcacccaaccagggcgggtcccatctgtggtgttgccatcagcatgcatgtcgtgtcatagaaagctagatgtgtattaggatggtcccccagcagtggactttgtggaaggagttgtgatgaaccttgaaaataagctgagtgaaatgagccaatcacgaaaggtcaaatgtcatatgactccatttatatgaaataaccagaatagtccatacagacagaaagtagataagaggttaccagggtttagggcaagaggaattattgcttaatgactctccagatacaaggtgcccaataataaggcagttccttaactacatgcactgtaggaacatgtgtcctcggtccaccccacacatgtttgctggcacctactctgtgactattgggatgtatccatgaataaaacaggttacatcccaatagggagggaaatgatacatgtgcacaggtgaaagatgagataatgtgccatggagagagactgaggcagccagggttggggaaggacactctggggcaatggggagacctgacagtggaggtgtgagggaggtgagggaggtgagggagccagccctggggctatcccagtggggaagcgcatgcgccctgatggaacagcagtcatggagacgctgaggcggaagggccggggtgtgtttgaggaactttaggaaagcccgcatggtggaggtgattgagaggaaggaaggaaggaaggaaggcgagatgagctctgataagttggtggtgactgcggaggtccgtctggttgtgagcaaggtgggaaccacgcagtgtgctgagcagaggtacgagtgatctgactcgccttggaacacagtcactctgggtgaccaaaagtcaggggtgggcattgcgggtcattttggtaaacttatcttccctgtagaaaatgagagggtgggtgggtattatcttctaaaagagttcatttggatatgaagttcaaaagcaactcaagatctttttgaaaagctggtcacaaatgtccaagcaagccttttgtcaaagaagagaggtggctggcggcccagtgccacagcatctggaacgggcctttgaacctcctgctgaggagggcagttggcaagtggaacctgctgcttattgtaagaggagagccagtcaccatgggctctaacctgcatcttcactgagaaccctacttgtgtgccacagtggaggctaaacagaagtgaagataaatctcagttcccagccattagatacacccttgaagaagacagacatttacacagcctcgctcattgctggccaggaaggactgacgcatcagaaggacagcagagattctgagtataaagactggagacactcggccagggcgtggtggctcacgcctgtaatcccagcactttgggagactgaggcaggcagatcatgaggtcaggagatcgagaccatcctggctaacacagtgaaaccccatctctactaaaaatacaaaaaaattagccgggcatggtggcgggtgcctgtagtcccagttactcgggaggctgaggcaggagaatggcgtgaacccgggaggcggagcttgcagtgagccgagatcgcacctctgcactccagcctgggagacagagcaagactccatcaaaaaaaaaaaaaaaagactggagacactcagtggcttttgtgacatttatgtctagtgaccctcacggtcctgttaagaaaggacctttcgtcttggtgctcccagttcttgagactcatgaacctctgtcttgaagagcgacagagccctcgtttcatgtgggtgtctcctccctctgtcacgtgcctgcatgggctttactgggtgtccttttgaagtcatctgggtgttgaatgttggcatggcatgcaggagatggcttcatgtgccctggaagtgccgcctcctgggtctgcttcaagaatcatttcattgtgaacaggtagagaaatgtcctcagcagtaagtcgactgagctatctcctcccttgggaggaattttcaaagagatgtaaaaggatttgagatggaagtggataaagaactgagccagagtgttttctctttaaagtatgaaccaataggatatgttaaaaaaaaaaaaaagaaagaaacacgttaaaagacttcagcaccctttatctgcattttaaaggaagatggtaaaagtacagtgactgaagtcaagctggagcctttccttgttgcaccaaaacattttggagggaaaaaggggatgggtcataactaaattaagaccttgtttgtgatctcatcagttccaagctgtcggcctaatttagtttgaaaaacgacttggaggaagtggcatgtttcaaaaaataaaacggctcgttaccagccccggactggcctttttgaaagaagaaaaatgtcattgctttttctccctaaaatgaacccgtccagtttgatagaagtcaagcatcttctgtggggcaccttgcaacacggaccctttcctgagctggctttttttcctctcggagattttgtttttgtgaaaaggctagcacctgccatcccctcagtggcagaaggcggcaggaagcatctttatccttgtcatcatcggtgtttatgatcagttcttaacaaaaccccagtctaggaggacagggagtggacagcctgaagacgcctccaggactccccagacctcactggggctccggttccaggctcttccttcactgagatggtccccagagctgctcacaagtctcaccatcgcatttccttggctttattcacctggcactaagtggcggaagcggggagagaagctggcatgcagggcagtcactcggcactgagaatactggtgtccagttcccggcggtgtgctgggtcagcaccacacgcacctggttttattattcatgcctctttaaatagcatggaggtgaggctggctgcttctgtagtgttgcatgaggcttttgagataaatgattttcaatcaacagaatcaatagcagctgtgctcagtacctcgcgcttgtgtacgggtttgcgactgaaaagctcacagcctgtgggtgcttgttgctgcttttccaccagtttgatttgaagaaataaaagcagtcacagaggaaaggtaaaagagttggaaattgtttcagattggacagaaccttcccttggcggttgtattcatctgttcttatgctgctgataaagacctacatgagactgagcaattcgtctcttctcacgctgctgattcgtctgttctcacactgctgattaagacatacctgagactgagtaaaaaaagaaaaagaggcttaatggattcacggttccatacggctggggaggcctcacaatcatggcggaaggcaaaaagcacatcttacatggcagcaggcaagagagaatgaaagccaagcaacaggggtttccccatataaaaccaacagatctcctgagacttattcactaccatgagaacagtatttgcgaaactgtccccatgattcagttatctcccatcgggtccctcccacaacatgtgggaattatgggagctacaattcaagatgagatttgggtggggacacagccaaaccctatcggcagttctgttttaatcttctgcttagcctgggagcccagaggagacatcagtccttggtctgcaccattggtctgcaacacattgagaagaaaacagtaattatagctagcagatgactcagggctggaccacacttcaggatgcagctaccagggctgttctggctgagcaggaggggagggaattccaaaaggacttcattcctgacttttttttttttttttttttttttgagacggcatctccctctgtcacccaagctggagtgcagtggtgtgatcttggctcactgcaactgcagcctccatctcctgggttcaagtgattctcctgcctcagcttcccggatagctgggattataggtgtctgccaccacgcccagctaatttttgtatttttagtagagacagagtttcaccatgttggccaggctggtcttgaactgctcacctcaggtgatctgcccacctcggcctcccaaagtgctaggatcacaggcttgagccaccatacctggccggacattctcacttctgtgacaccaaactcttcttgttttctccttaccttagcccccaaaattcctgtgttgaggtcctaactccctgtacctcagaatgtgagtttatttggaaacagagttgtggcagatgtaattcactaagatgaggttatactggagtaggacgggccctaatccaatacgaccgatatccttatagaaagaggaaattgaagccaggtgtcgtggctcacatctatagtcccagcaattctggatggccgaggcaggaggatcacttgagcacaggagttcaaggcagcagtgagctaagatcatgccactgccctctagtctaggtgatggagcaaaagccccagtctcttgaagtaagggaaaactggggctcagaggcacacggggagaatgctgtgtgaagattggagtgatgctgtcacaagccatggagccaccagtagccaggagacaggcctggagcagacccctccccagtgccttcaaatggagcatgggcctgctgacaccttgattttggacttctggcccccagaactgtaagacaatacatttctgtggtttaagccacccagtttgtggtgctctgacttcgtgagcttttctgcccatctgacagcgcctgcctgccttcctccctgcccaccgtcctcccgccccgtcccagaccctcctcgctcctcatcccactccactcctgtgagtgctcctccacaccatggctgcaatccccaccttaagctggggactcccaaaccccgacttccccacagggctcaggaggcctttctccagccagcctcacatttggactcatgcttctcccccatgccaccctcagctacgctgaattattcacagtaatcgcttggttggggaaaaggttagtaaatgccaaaggaaatacccacagaaatctcctacacagcttagatgttgtgctggcatttaaggcccatgagtgatggtccattctgcagcttttcatgccatgcctttcctttgtgtgggggtccacagatcagagtctgtctgtggcatcgacttccttatgtcctcattgttcccacccattgctgggatgtccacgttggacttctcaaaagtggcccaagaatctaagtgcaaaatctgtttggatttttacaattttttcctaatcttttacagtcttggtcattcctatttcaactgcaatttttttcaatgacttgccttgtgtgaatattttttaaagcatccagtattaaacaaaaaatttaaacagcatttctgttcattttcacattctttagtttgtgcacctttttttttttttttgcgacggggtcttgctctgtcacccaggaatacagtggcacaatcatagcccactgcagccttgaactcctgggctcaagcaatccttccacctcagcctcttgagtagctgggactacaggcgtgtgctaccacacccagctgattttttttcttcttagtagagacaaggtctcattatgttgcccaggctggtctcaaactcttgagttcatgtcatctcccaccttggcttcccaaagttctgggattacagatgtgagccacggtgcccagcagtgcacagtctttaataaacaagtacaaatataaatgataatacaactgacataaacaggattaggtcatatataagggacccttagtaagtgcacagctcagtgggggttggtggcgaacagcctgccagcccgagttttgcgtgagtcaggggtgttggtcaaagcgttgtacagaggggagtggaaacgctggtgagtcaggcacgtggaggtccgtgaacatttattattcactcagttccttgaataggctgaatgctctttgtcccaaccttgactcatgccagttttcccgccagcatatcttctcactgtagactggttgccacttatccctgaggtctcagttatcacttgctccaggaagcccaccttgcctcctttaggctgggttattcttcctgtgtgttcagtagcgccccctagttcccatcagagaacttacacctctgcatggaggtatctcccaaccacccctaagctttgcaaggagggagctcttagctgggccattcatcatcagatccccagcacctagtacaatgtctggcatggattaagtgctcagaaaatatttgtgtgagggagggagggaggagaggaagattatgtaacttgtttatcagaaatttgccactccctaggttgtaggataaggtgtgcctccttagcaggtggggaggcctgcctgcagtatgtcctgtggtagcagtgatcttagtggtcatggaagtgtggtggtggaggtggcagtcatagtcatgaagagaagactaatgcctccaccagtaacagtaccaccatgtggtatttgtgggctacttagcacagattctcagatgcatcagaccatttaactcatgccccccagttccctggctccagatgccctgtgcagctccacactttacagggttaagccgtgcttcccttcctcctgttcccacctgttacaatcccatgcctcctcctcctaggccagccccagcactttcaggctccttgttctagtgccttcttgtccacgggaccccttctcttcccagctccggccctggattagcatctccttccaactccaggcagaaaggaacagatcgctctgtgaagaatgttcttggagcccctaccaattctccactttgcccttgtactcagatgaggcacatccaacagtgaggggagttgttcctaaggaggaaaagcgtccccccaatagctcatgagcatttaaatagagtaaacaagaacattttgttggtggtggtggtgttttcgttcagctctcattatgccattgccagctcttcagaagagacggaaaggggtcaagtccccttcttccagcttttaataaagcattgtgagaggaggaaggaacggctgtgggaaaaggggtcagagtggagctgggaagagaatgagttttccaaatttcataatattcatttgtctccggacattggccttcatgccttcaccgtctctgtgcacagcactcatagtgtggtgtgcagaggacctgctgagctggggtgcatggcccagagccatgccagggagagctgtgtccctttccagggcttccctacaaggtgccacaaaactgggtgattaagacaacaacaaggagttctctccctgttgtggagactggaagcgcgggggccatgttccctctgagccccaggggaagaatcagctctcaactcttccagcttccagtggtgctggtgagccctggtgtccttggcttgtagctgcatcacttccatctctgtctccactgttaatggccttcttcccttcgtgcatgtgtaggtatctccaaatttcttgccccttgtaaggacaccagccattggattgaaggcccactctgacccagtaggacctcatccttacttgataacatctgcaaagacactacagcagtccctccttatccacagtcaaccacatggtctgaaaatattagatggaaaattccacaaacaattcataagtgctcaattgcatgccattctgagtagcatggtgaaatctctcaccctcccactctgtttgatctgggacatgagtcagcccttggtccagcatatctacatggtctcgctacctgccctatatgaaatgactgcaaaggaaaaaacatagtacatacaggcgtcagtgctatccgtggtttcagacatcccctgggggttttggaacacatcccttgtggataaggggggacacctgtacttacaaataaggccacaaccacaggtactggggcttagggttccaacatgtcatttggggagcacagttgaacccacaacatcagctttgtaggcgtattctttcttgcttcctgggcatggagggaatgaaccacagaatttttgcatgtgtgcctagtgcctaatacagacccctgggctgtggacacccctgggctgtgtttgggcttcactgtattcaccccgccgttactgcagatgtgattttctttcctctgcctcttggacttggttgcttgttttcatgtccttaagagaatatttctgttgtaatggaacatttcacctgtaagagatgagaccttctcacaaccaacagagactccccaggtggctggaaatagaacaaggctccggttttttggcaaaagaggaaatacttgaggaccgtggctggtgagagacattgccagtgctgggctgagggggtaaaaacagatttggtgaaaagtggcccgtggtgctctgtcaccttgcgggggggcggtccttgtgcatctcctggctgttctggacactcagcatcttgtgagctaattgtggctgtggaagctttgtggtctgaagctgcaagatccctcataccagaagcactttcctaagagcatgacaatgaggctgtgtgaaaaagaaagctggacggtgctccgttagcttccgagcactcatgaggatccctggaagtttcaggaagcattgtgtacccaagatgctttgtccatgtgggctatagccccagggaatgttttcctttgctattttttttcctctggccgatgttcatgtggaaatgtgacctttaattccttaaagatccatctccctggaattaattcctcttctgaagtcataatctttcacgtaatattttctggtcatctcaactccaagtaaagtgttgtatgtcacaggtgggggaaatgatttgggctttttgcatgccatttgagtgtaagagaagagaaccgccgtggttggaggcaaagacatgagggtggtcaatgtctgacattggaagtggactgtgcttgttgtttatgtcatctgattgaattatttctcaaataatagaggtaccttccaggaggcaaacatctgattctcttcttgtgtatctccattaccatggacatttccctaatgtttataaagagaaaagctgcaaattcacatgaaccccacaggttctaaacataacggttgatcacatgggacctgttatcagaaccatactgttcaaggtttcccagtgtaagaagccaagaagacgggagccatcacttgctgctacttgcctgctgtggttcacgcctgcagtccctcccagatgccagaactacttcaggaaacacgtatgatgtgttcttggaagctccattggcaaaccgtctgcagagcctctgtgcgggtctctgctgtgagttcctcctctggcccctgcagaaactgagggtctatgaaatgattggagaagggaggggaaggaggtgtgatactccctcctccctccagccgcttgagactggccaaccagggaagtagcaaccctactggaattgttgaaacagtccatattcatagttgctaaacttgacctatgcggtaaaataacatgtttttctggaacgagcagcatgttgtcagcctctcctagatatagtggtgcggaccacccagagtgagcgctcacttaatagaacaagcagcccatttactgataggcaccttgtggttgaaagatgggaaagaagacttggattgcacttgcatttatattctctcattttcttgttctattaaatacgtccaaacaaacttagtgtgtgggaaggaaggacaccttagcatgagtagtgaggaaaatgcagcatcgctaagccagtggagtttgttcaacacattcctgccactgtgttgcagaggacatcgatgcccagtgacacatgaatgagttgctcctggcctttgtcctgggtaaatggcagggagtggcagtgagggtgtggagagcctctgcccctccatctgggaaggggtccaggctgagcagggctcccctggctccagcagctccaaggtcaggggtgtgtgatctgtcaccctcttgcccctccctgcactgggcatggtgacccacaggccaggctggaaagccggcctagaacatctggatgaaggcagacttattagtacccaaaaagtccgtgggtacccagtcacgcccccaaggggcaggcttttctagtaaggtttagggaagagcattcgtagtggtaaagagctcaagttccaatctccaccctgccccacctgctggtgcatctcctttggcacatcaccaactcgacgtgcctcatcagttaaagcatttagaatttggcacgtaatcgatacttaataagtattggctgttacgtctctgtaggtaaatttacaggggcactgcagcatgagaagctctgttgctgggctccatgcaggcaagcccaaggagcctggctggtgttcagcagggtgtgctcatgattcatgtaacccctggcccttcaggccttgacagtccactctggacatgatgctctgtccttgacagtgaccagcgtccgggcccgtggtatctgatgagcagcatctcccttcagtagcatctctgtgtacatctcatgctactccgatgtagacagccatgcatggggtctttcagctgtcctggcagcactgcctttcaggtctgagcaggcctgggtatttagcacagaggtctgaagaggttctgagtccatggactaggctggaaaacctgaatcctaacccaggcagctggtctgcagtaaagatggttcatatttattgagtgtgtactatttgccagctgctcttctgagggttctccaagtatgggctcatgtactcttacagcattccaataagatagttactaattttatcccattttttagaagggcagaatgaggctcagaagtgttagtaagctgaccgaggtcaaacaaaagtgacagctggtgttcgaagctgagtgtgttactttggtcccatcccattaaccactggggatatgaactgctatggaattgacaccaaaagtgccaaaagccgaaagtggcttttgattgcataggatgcctgcagccctgccctcccatgacggatattcaagtgttgctgctctgaggcccacactgcatttcagtgacatctaatacccatgcatagatggaggggccaccacgcactaaacccctgcccggactcaccctctagtaaaggagggaggcaaatgatcagcagtgtggatcacatccgtgccctcctggacgtctgaatggggaattggagacagcaccaaaaagggaacaaaaaactccatgaagaggggcaggaaacactccgtggagggggtacttctgagctacgtttggaagaataaataggagttcattgggtgtttcaaggtggggcatataggcagaagaaatagcatgcaaagaacacaagtataaaacagcaggataggattttttgttaaggtgggggtgctgtaagtacttcagcacgggtagaacggtaaaatcagggaaattctgtgggtgttgaaactggagagacagaaagcaggagacacagggcctggtttgccgtgccagggaaccggactacatcccaggacgatttaatttcatagtgttacaacaaagttgaaatctccaaaccctgatgcatgtagtagtagaaccattttccctggtcttatggttgtcgaaagaaaggatgacaaaagtaaataagcttccccatatgatgtgatattgactttgtgctacaaagaatgttgtttttaaatctcttccactcatttctccagtttttcatcagcagttccctttggcaaaagttattctcagatgccaggataagtgcttttgagggtttttgtttttgttttaatgtttttttttaagtggcttttgattgcataagaccatcatgtagagctgtttccagtagtatctttatagcaggaatggaggctaagactgattatgtaattgttcccttaatctattctcagaacctaacatgttgccagcagatgaaaaacctaatgatcataatggcctctgagtgtctttcctgctcatagtttctggtgctattgctctcacattgtttactgcaaaatagaaatcaatggtttaaatgtggcatgactgctcacccagccctggccaccctggactcagatctgtctgctccctcttgcatgtgcagcccacagcaagcaggtcttgcaggagaaggggtgcaggtgtactcattagtgacccttgctggtgtctcacatgttaatattgggatgaggagaggcagcccacttctgccacgctggggttgcattttgcaaggagagcagaataccatctgccagaggaggtggtgggagcgtgcaaatactgctatgaatgccatgaatgcttaattgctatagattttgttttttagtttgattctttgcatttagtgtgtttgttgtttgttcttctttttattttttagaatagtccttatcagtggcagaagatccttctgtagtatattttcagtgctgccgtatcgcgacagtacccaagtcgggtatgtatatgcatgcatgctttgtagttctctgggtgaaaagatctcacaccaatgtacataatgtggccatcctttccattttcaagaagttgccttgctttgatactgcaaattcagtatttgtacactggaatgataaaaagatgttccactttcttttcagccagaaagcttcctcgttgtgtgtgtgcgtgtgtgtcccatcctattgcctgttctttctaaatctacattttgttaccttatccaatacttgctttagcaagaacattatggggcccaccatattccacagggccatgccaacctttggaaaaaaggtaggtcaaggaagaaatcagaacaaaccctgtgaccattccacctccttgcatcttgggcttgggtttggaaactgaccagcaagctggagctgccaccacagagaaacatcaaagcaaaagggttccaggaccagagattaggtaactagctacaggccagaggaatgcttccctctctagatcaacaagcccctcctttcactctgaaaaaaagtaagtacctgagggtccgtccttgcaaagcctccgctcttcatcgccatccctgaacaccgtgttccttcctccttgtgctccttttgccttttcatgcatccggtgtctgtcatcaggctgccaccggtatcgaagtcaggacagttcactgcgtaagaagtcaagcatcatgggatgttggctgtggcgtctggtcattgtgccagccacaccacagacatgtgaccactgtcccaaggagggccgtatggccactggtgctgattcgccatgtgttcatcttccaccatctccgtgagctctaccccaggccttcctgctcaccatgacctcccctttcccctgtagatgtgctagacttacggcctattcgattcaccaaggtccttagctgcactcttcattgtcagctccatgggacagaaaacacatctatattcatggaatcctgactcagtcattgatgagatgtgtgccttaaggagcgataatcatggcactgtttgttaggcacacactttgagctcgtctttttcattatttacatccttacagccaaaccttgcaaagtaggtgttctagaaaaagtagcagcaaatcctgcagctcggaggtttaaggaccatctagtggccagtgggctgcccagagagatgttttcgggcagctctctttgactgacctacctgctgtggccccgggtctggctacattggaagagcaggctcattccttgacaaaattagctcataccagctcatagacctggtgtgaccccagaggccagttaattcatcttattacaagtagtagccgaagggcccagaatgtttgagtgtgaccagcctgggcatacacctccagggtgtctgtattatcagtagcaggctctttgccagcaggtcctctcttggccagagcttggatggtactgtgacatcagcctcgtttctctgggtttccctggctgacctctctgattgacacattctttccttagctccatctcattcattcatttattgagtgcttgtcatgtgaccaggtgcccgggacaaaggcagagaaggatggattgggttcgtgtgcccctgaacagcttagcaggggagacacattaaaattacacacacaattaactacaactttttttttctttttttctttttttttttgagacagagtcttgctctgtcactcaggctggagtgcagtggtgcgatctcggctcactgcaagctccgcctcccgggttcacgccattctcctgtctctgcctcctgagtagctgggactgcaggcgcctgccaccatgccaggctaaattttttgtatttttagtagagacggggtttcaccatgttagccaggatggtcttgatctcctgacctcgtgatctgcccgcctcggcctcccaaagtgctgggattacaggcgtgagccaccacgcccggccaactacaacttttaatacatgctggagatacccagtcaagcaatccttgaatcttcctggctgaagactcattctgtttctttaatttggcttctccacacttgtctttgaagtgtccatattcgttttattccccaaggtctggggtagggtagccctcactgtggtacccaagtgctcatccccattttgtagatgacatcactgatccatccttaagagttgaaatctcaaacatcaactttgggccagaatgggggtttaatccccagtctgttcagccgtaagtttttccatgacccacactggcagacaggcaagataagttctgtatctgcagaaaccttgctgcgaaatggagcttttctggtatctgcctcccagaggttaactgtagctcccaggagtgagtggatccaaggtttccagcatggcacgtggcatgcagagaagtgctagggcccactcagcaaggaccccatatttctgacagtaaaaaagaatcattgtgaagaacttgggagatttagaatttttattacttattagcttctgtgagcttccattggctcctctgtagaatggggaagtttctacctcacaccattaacttgaagataacgacatttctgcaaagccattaggaagctgttttaacttaaattacccaggaagagggcactcagaccatctccactggacatccttgtggatatgcgtggccctccactcttcaacatctcagggaaatgctaggtggcagccagttggtgctaggaaacagtgtctgttcatgcctgggtctccttcttgctgcttgggaaggcctcctgtgttgcagaaagggccactgcataggatattcagcagatttggctgctgtgttggccctggacagagaagcaaaatgagtgtgtgggatcccaccttttacatcctaggtgtgaacagattcaaatccactattcctccagattttatagatgaggaaaccaaggtgcacaagagggatttttttgttttgttttttgtttttgtttgtttttgagacaggattttgctttgttgcccaggctggaatgcagtggcacaaacatggctcgctgcagtctcgaactcctacgctcgagccatccacctgcctcagtctcccaagtagctaggactacagtcgcgcgccaccacacccagctaatttttaaaatttttagtagagatgagatctcgccatgttgcccagactggtctcaaactcctggactcaagtgatcctcctgcctcggcctcctaaagtgttgggattacaggtgtaagccactgtacccagctagaagaggatttttttctataacaaaaaaatcttcaggtcctttgtcagacctaacagaaaagaacatgttcgtttctgcagcacagtctacctctgtactcacccaagaaacactgagcacaattccaaatattgtgatgtagcagcaggattaagaagcagaatgctttttaaacttttcaatgagcagacattgtatttataaacaacccacttaaccataattatgatttttaaatttttttttactaattgggaaacaactatgctcaaattaaaatgtactagtaagtatatgctagtaaaagtttactagtaaatatacgaataaatatatacacacacatattttaaacaacttcagttcatgtacatattaactaatgcctttccacagtggaaaattcctttacttttacgctgaagttctttttgtgactgggacgtaagtcatagaatttcaggggtggaaaggccttcctgcttcgcagctgaggcacagtggggcgaagctcacccacagccccacacctggcagagtcagcaacaccggaatttgggacccgggctgccccagcctgccgggccatgctttctggcctccatgtttccattgtactcatgcacatggacccagccacatgggcctgattattccaaacaagcacaacacccccgccaccccaccgattaaggggctaatgtgcagctccaacttcatcacaagaaagttctaaaaacaggaatctcgtagttcgtctgctgggtacttgagcctccttcccatggaaagcatctgtcggggtggcctgaactttctgggtttgttttctggccacttgtgctgcactcaagcttcccagccctgcctcccacatcctcacttgccctgcctcccgcatcctcacttgccctgcctcccgcatcctcacttgccctgcctcccgcatcctcacttgccctgcctcccgcatcctcacttgccctggctcccgcatcctcacttgccctggttcccgcatcctcacttgccctgcctcccgcatcctcacttgccctgcctcccgcatcctcacttgccctgcctcccgcatcctcacttgccctgcctcccgcatcctcacttgccctgcctcccgcatcctcacttgccctggctcccgcatcctcacttgccctgcctcccgcatcctcacttgccctgcctcccgcatcctcacttgccctggctcccgcatcctcacttgccctgcctcccgcatcctcacttgccctggctcccgcatcctcacttgccctgcctcccaccatggcctccacattttgttcttggctttaacttgaacactgattgtggattctgacattagttgatcaaagcagacagaccaaccttaggagggctttctataatactacctattcattcattcttttatgcattaggtcacttgttctgctcccagcgaattaaggccctgatggaggctggggaaggggtggggaggaatgagttaccaatcccaagacaatggagggtgggcagggaggcactggagaacactggagctgcccacaaatcctgaccaacacccacaattatagtaaatgtacagtgttaagtaaaagcagggtgtttgctatgtaaaatttctttatccccacccccccgcaagtgccttgccataccagcatgccacctatgtggaggtttaggggctaccattgtacagcagaattcactcacctgcagcctggtgagcacctactgtgtgctgggcactgccatcctgccttgggtacactggtgaaagagaaaatgtctctctgtgtgtggagcctactctccgtgccatccctctggtcctctgtctgagtaggagacgggaataagctagtaaaccaatcatcaaacaaaatagcaaaaacattgagtcctaagcaatgtctgattagagcagaggaaggagttgggtgaattcagatggcaggatccgatgtagtgcccagcgaaggcgattcttcagttagacttggaagtgtgagaccttagagacatgagaaaggatattgcatcctcagcgttgacttctgaggatgccagcggatgatccagctcctcgtgaactctcaggcagggcctgccctgttgagagatttagtgatgccttattcaagctggagtcccatttcccagccacactcagcatccagaccactgtagtgaggggcaggggagagggctggggacaggagtgagctctgacatatgggcccatcacttagccctcctgagtctcagacccctcatctataaaatggggatgtttaaccagatactacaaggaccctgtgagtgcaaaaggttgttctcattcttgtcagtgctgctgatgcagaagcagtaagttgtgttgaacaaggaatttatgaatgaaacacactgtccacactccccatctgtcaataatcagcaacttctcgagcacctacctgaatattaatattcattgagtttcttaaaattgagattttttaaaaatgggcagatctggtggcttcttgccactgtattgggcacattttttcttggtgtgggccgcgaggctaggggcttcatcaccctgggcttgggaacactggaaaatgtttggggtcgttttgcatgccaccaggtttagaccaagctgataagggatcggcctcacagtgatctctagagctgctgcttgaagcagactgcccgagtatctaacagccaccgcagtctccagcatgctcttccttaccgtgatgtatgggtgtggatatttgagagaaaagcacatttctctaggattaacgaagggtgcagtcaagcatgtgtgtgaatgtgataaatagaggtaataatagaaacatcctgaatagtgcttacagtgtatggcatcccaggcactggtccacatgctttatatgcgctcactcgtttcatctgcccaacagcctcataaggcaggtgccagtattaccattttacttgaggctaggggctgagaaaggcttagcaactgcccaagtggcagtaggtgggggtaggtgggggcaggcagtgtggccgcagatctgccctgttgtgtttgctgctgtggagccggttcagcccgggaagctggaatgcacacttgagaaccaagtgtgtttcccttcatgatcgcgcctttggggctgggtgtgctggctcgggaccagtacaggcaggcagcactggctgactggtatgcattttggtgaagatggagctcggaggtcacagctctcataggtgtgccacacacgggctgccctctggggacaccagctgctgagctgatgggttgtagctttcagaaggctttggagcttgctggttcaccctgcagacttggatgctcccaaggcaaataccagacatctctgggtggagtcttaagtgaaaaataatctgtgtaatttccccatctggatatttgtcgtctttagaataggaaggtgtgtggagtgtgtggagctggtgaaattctcctggtgtctgtatggtgttgatgcactggctctctgcagaggtgtgggtgttcctggctcatgaccctgaagtgctgccagctcgagtctccctggcaccttttccccgatacacccaagttgccccctgagcaccttcaggaagccatttagggagcagtaagggtctttctcatgtcctgataccatacatgaagaacgcttctctttgagaaagggtgcagcattgttgcattagaggattccttatcacagtaccaggcatgtcttcacttcacaaaaggatttgtggcagggccacagagctttctaaactgctcataaaatattgtttgatttacagagtttgcttgaattcgataggaaatcgtctgctagatataatgagatgcttctgataactgtccgtcttcatgttcttttactttaggaattcaaagtcttgcctgcagcatgaacccctagtggctctgagagacacagaggcgtggaatagagggtagtgtatgctcagtgtcctgagttgcagacattggagtcccctctgatggttggggtgtggggctgtggttttcaggtaccttacaggatttccaggacagacagaaaccagcacagacacccaggaccaacacagtgagggtaacacagccaggacccacttacagccataccctggggctcttcccatggaagtgctgttgacgctgccatctggggcccccaccttaggcttgccagaagttctgatctccccaggtgttacttccacctccaggtttcccatgagtgcttccacttagcagaacctaggccccctgtgggagcctggaaaatgtagtttttaacagttacctgggtatcatgagctagtctatggtctctgccacagtggttcaccaaaagatctgcctgtccccaaactgaacctggggagactgaagaaccccagatcagggagaactcaagcccctgatccaagcctggccgaggagggagccctcagggaaccacgggtcgctaagaagcttagaaggtgccttccttccccataggtgtgctcctgttaaggacaagacagtgtctagtgagactgcatagatgtccaaacggatttccaaagcccaggagctctggattcagtcaggcctaacttaaaacctcctttgtggtcccccagacttaacagaaacagggcccttgaggctctggccttggcgttcctctccagccctctctcagcacagctcctctctcagccctagcaagctacccatagttccttaatgcatcaggctctcctcacctttggggatactcagccctccctccaggcagctttctcagtgccccccagcacctgttcccccacccccagctccactaagagccccttcctgtctcagggcttataatatacattttaacttatttttcacttgtgggtgtggattgcatcttaatcctcaaggtatctgcagcactgtgcacagaaagtagtggtcactctggttttatgtgttgggtgagtagaagcaaggtttctgaaactttcgagaattgctatgtttatgaatatagtgctcacgttctctctctctctctgtctctctctctatatatatctatatatagatatatatagattagatatatagatatatataattagatatatagatatatacacagatatagatatagatatagatatatattgccccaacaaaggacagccggactgcttcagcagaagcaagtgcatctctcagggtccctcagcctggcacctcatccttgagggcacctccataaaaggatggagttggatggttggccataaggaaggcccagaaggtgctaacacggatgagctgacatggacctcagggtcctgcttctctccaagtgactctgtcccacccacagtgaaagtcaaagttgctaagcctgaagtgacaaaagagggcgtcgagctgcacccagatgcaagtgctaagccccagcgaggcccctcccacccactagccaggtgactccccccgcattagcctcgcagcctgtgcagttctctccgatcacgagtgctctgcacctacagagccgcttacaaatacttgcaccctgaatgttaagcccaaggatgccaagggcctttagataaggtcacactggcttctgcagtctttgctcgagccctgttggaattccctggcttttggctgacaggtttatctagtcctctaccaactcaggttgtctgaacatctccaaaccagcagcatgtgagcaacatgtaagtcacacagccccatattgagcaggacatattcagattgcatctagcctagagtaagaagagggcatttttggttgggtgcggtggctcacacctgtaatcccagcactttgggaggccgaggcgggcgaatcatgaggtcaggagtttgagaccagcctggccgacatgatgaaaccccgtctctactaaaatacaaaaaattagccggacgtactggcaggcgcctgaaatcacagctactcgggaggctgaggcaggagaatctcttgagcccgggaggtggaggttgcagtgagccgagatctcgccattgcattccagcctgggcaacagaatgagactccgtctcagaaaaaaaaaaaaaaaaaaaagttggcgggggggcatttttcccaagctcggttctgtagagagtgggatgctctatcctgtccctggagcccctctctgtgtctagggtggactgaagcccctgcctgcatcctctccgccaccacccacccgcactcatccacacacaatctactccttattgccaggcccttctgaagcccagcatggccatctctaatcaggtgcatgtgttaggaagctgtcaggacttactggcatgcattgaataaagactgggtatgggttgtgcccacgcctttcaaataacacagctgttgatcccagagtcccactaatcattaccagggatagattgcacggccacttctgcttggggtggccctgagctaattcattaaagggtatgtgaagtggaagatagttaaggtaaaggtaatgccagaccaaaaatgagttccgtagtaaggagcactcttcagctcaaatatagtcttttaaagctggaaggaacttggagactgtcggcttccacttttttttttttttttttaagctgaagaagccattcttccagtatcagtttacatagaattccaataaataaaacagctaaacagagagctcttctggagaatcaggaatgggcacaagtagcccattcatccccactcctgccatccacctcctttggtgcctccattaggaaaaccacagcccttacccatccttgctgtcgtgtacccatgggcaccggcggccagggaggcagtgtggtgcttgggaacgagctggcaggcagaagcctcagtcctgggaaatgaactagccttactgaccccagcttcactcctccgtaaaaggactataatgtccacctcagggagatgaatgaaatagtaaatgaaatattatatgtgaaagctgtagtagatattcattaagcattagtttcacttccatttttgtccagtcacagagcttttttttttttttttttttttttggagacagagtctctctcagttgctcaggctggagtgcactggcggggtctcggctcactgcaagctccgcctcctgggttcacgccattctcctgccacagcctcctgagtagctgggattacaggtgcccgccactacacccggctaatttttttgtatttttagtagagacggggtttcaccatgctagccaggatggtctcgatctcctgacctcgtgatctgcctgtctcagcctcccaaagtactgggattacaggcgtgagccaccgcacccggccttctttttctttctttttgagaaaggtctcactgtattgcccaggctggagtgcagtagtgcaatctcagctcactgcagccttgacctcccaggctcaagcgatcctcctacctcagcttcctgcgtagctgggatgacaggcatgcaccaccacgcccagctaatttttgtattttttgtagagtcgggtttcaccatgctgcccaggctggtctcaaaatcctgggctcaagccatcctcccacctcggccttctaaagtgctgggattacaggtgtgagccaccgtgcccggccatcacagagctattatgttgctctttctagatctacttgaacttagcagttcccagtcaggttcacagtgagtttgtcagtggtgcaattctacaaataatggattcaccttgagatctgcttttattcagtctttttttcctcaatagtacatgtttcttaaagactatttgaaaaatgtataaaagtaaaaggaagataacaattattgagcctcacctcctaaacaaagccaccatttacattttggtctatttccttccagtcttttttttttttcttaatgcatacactttatggaacgtgaggagaccattgttttgctttgatctttcttgctaaatcctacctttcaaaacaagcccattacagagaagaggaacagatgttgcccagctttttcactgtaactgtaacatcaaaccttcccatagctgtaaacactcttctcagatgaagcttgtaaattatgccattttctgggaagagtcccagccttaaaccagctcctttttcctcaactaacacttgccaaggccagcctgaatctttctgccttttatccacattagtcacggccttctcttttctagtgtggatttgtggtttggcttggtgaccctcagctcacaaaatgagttgcaagcaactttctcaactttcctaaataggcagaccccacttagtaaacagcttgtccaacacttctatccaagaccacttctcttcccctcgctttccagcccccattgtgggctactgtgccaccgccatagggccaggagtgggaaacctgggccctgcaaaggaatttatggatttacatgtagagagagggaaggaattgtgaaaaacaggaatagcttaggggaaagggtcctggagtcctaagaaggaaagggaagttcagagaagaaggtgaaataatacaaacttgacctttaaagtgttactcagctgggcacagtggctcatgcctgtaatcccagtactttgggagaccgaggtgggcggatcacaaggtcaggagttcaagaccagcctggccaacatagtgacaccccatctctactaaaattacaaaaattagccgggcatggtggcatgtgcccgtagtcccagctactcgggaggctgaggcaggagaattgcttgaacctgagaagtggaggttgcagtgagccaagatcgtgccattgcactccagcttgggcaacagagtgagacttcatctcaaaaaaaaaaaaaaaaagttcctgagggtcaagcctggaccaggaaaccaagaggagagactcaacttcctcctatttttttaccctcatacaccctctgaccttttgcttctatgacccgagctcttgtttttgcttttgggctgattcagttacattataggctcagagagccttgggtaggctaatctccacttactgcatcaatgaaaaatgcattctgagttccaacttgccagcccaggagcttctagagcacgacccactggtgagtgagagactgcaggtgttgtatggagaactagtcctagaattgtccctatgcataagggaaccgacaccagccaccaagtgctctttacttcctgagatctggatgtgggttggtatttctgtacacatggatccgaccagaagaaagtaggagagaacctagtaaacttgagattggaggttatgtgaaatcaccaaactagatgattccagcaaaaagagtttctgtgatgtgtgtgtaggttcacaccccttaagataaccatacttgactgtatgatagtcgcaggagtcacttacttactacagatgcatcagagaccatgtgatgaagaagatggcttcccagtggagttgcaaggtgcctctggggggtgtgtttttaaattgtcaacagcttccacatggtgtttatatccttaacttttggcattgggggcattcagatgaggtcatccgcttgggtccatttcctgagtgttgatcattttgcgacacagagaacagcgtcttctattcttagagccttcaagcctaaatgctccctgcctggctccaggcccatgcccccttcctccccacccactttccccagaaaatttttgttgtggaaaattacacattcacaaattgtgtttctttcctcacaccaagcatattcccacacagagacagattctggaatgatctcatggatgactcatgccattatctggctgtttataggagctgcctttagacaaagatttggtcataagctacgttaagaccccttcattgtctgccagttgcccttgcaggggatggcttatggcttatcgatggagtcctgagtgggagtgggaagggacttctagactaaaagctgcttttgacttcacttttgtccatcaactgtggaccctgttccattgtctctgaactctggaggcaccttctgcttgatgtcagcaagcaggcctggtccaagatggcagctgcactgtatcggaagggcaacaaacgggactcttaagctaaggggaagacttgtgtcgtcgacttccggcccatgtgtaatctcttaattaaaatttagctcacaagtggtatttcctttcgtaatccagctttcaggctttgctttaggtgcaggaaatctctcactccttattctctttgaagggtctggaaatcctgttaatatttaattggcttttaaattattgacacatcaaagtgttcaacctattgttgtcctttgaagagctagcgcctagtggagctcctggcaggtgttccaagttcttgggcttagagcaccattagagaaaggatggtggagagaagtcaggaccactccattttggaagcagaaagccttggaacctagttaattggatcacactttttccatctagtttccaggtgttagatatttaagtcttgtctttttttaagagagtaatattaattagttcattgatcatgctccctgaggaaagggccatagcttgaacttcttgttatctaatagggaatcttgttttcctgtcagaatctgtttcatgcattatggctcagtgagcagctggctgggcctctgccagggagccacagaagaggaaactaaaaatcattttgccttttacaaaagatgaagtccagagtcggccgttttatgattaataatgacctaggtattcccctttggccccaagatagctagattagccacctgctttgatcaggtgactccacagctgtgcatgtgtgctttgtgctgaagaagccaaaactaagacaggggtccaggggtttctaacagtgaaattacaggcattcaaggagagctacattaaattaattttggtgccatcctatgaaggatgagtttacactcccaaaatgaaccagcctgtttttctgctcattgcttaacggtataactgctgcttggctgtctccccaaatgtgcttttacctcctgttttaatccccacccccatcttctgagtccctcccttttaccccctccagtcactcccactcccccacccccgtgggccagttttaaatgtcagcctttgtttaaaaaaaaaaaaaaaaaaagtatatatctttgtgctggattttcagtgtgcttgttgcctacagcctctgcagaagttcacaaacttgcacagaatgtgaaagcagctcctctaggtacatgtggctaagctgcagcgctacccaggactgtagagagaaggaatgacaaccttgcatcgtccacagttccttgccagtagttcagttagggtgtctgtagaaatgagatcacttcctataacctgactaaccgtgttcacctctgagtaaaagctgcaacattttaacctaatatacacaactttagacaatattcatgtgtagtatttgaacttgcctctatgccatttttaaaaggaagtggaatataagtaaattagtagggccaggcacggtggctcacggctgcaaccccagcactttaggaggctgaggagggcggatcaactgagttcaggggttcaagaccacctggccaacgtggtgaaaccccatctctactaaaaatacaaaaattacccgggtgtggtggcaggcgcctgtaatcccagctactcgggaggctgaggcaggagaatcgcttgaacctgggaggcagaggttgcagtgagccgagatcgcaccactgcactccagcctaggcaacaagagtaaaactccatctcaaaaattattaaaaaataaattagtatttgaacactagatgtgtctgggaaaaatctggctctttcaaagaaagtgaaaacttcaacttcagtttgcttttaattactttcagctgcagttcgacattctctagctctatttcctggtgctggagagttagtgctggcatttcagccaaacagatatttctatttttaatataccattttaatgagaattcagaacaatgatcttagaaaataccaagatttcatcacactccactgggacttctgcttcattctttctcactggagtttttaaaagattcttttggagcgaatctccaccattcagagttcctttctgcatgcaactccaacgttctaggcttccaaaagagagggacagcaaagaccatgggtcttgcctgcttttcactcacacataaagactgagcagttgcctgagctgttaagctatgtggcacaatgtgaaactgctgtttatgggggtcaagtacgaccaaagaacagcaatttcatgtttcatgttaatatcagaaagattccagcaacattgatcagagcccttacctaagaagaatgaacccggaaaagtttgtcagcctctttgtgaaagatgtattttttagatcccaagagtcttaacatatacaaattaaaaagctatgagaagggccaggcgcggtggctcacacctgtaatcccagcactttgggaggccaggcgggcggatcacaaggtcaggagatcgagaccatcctggctaatatggtgaaaccctgtctctactaaaaatacaaaaaattagccgggcatggcggcaggcgcctgtagtcccagctactcgggaggctgaggcaggagaatggcatgaacccaggaggcggagcttgcagtgagctgagatcgcaccactgcactccagcctgggtgacagagcaagactccatctcaaaacaaaaacaaaaaaaacctataagaaactgacattgttagaaatgagatctgttttgttttctgtggacggctgactatgcccacgcctgtacgtgtatgctcttaattccaggccagcaaaatggtagccctgaagttagtgataacctctccctgaatctgagggaggaaaagcgtggaaaagttgccctctgccatcacgaagctgtcagtgttctagagctgagatgatatttattactgtatcagcgaagttttgaagtgtgactagctttggcgtacaagaaatacctcatttcttctttttaaatctacttaatatgaactgtaaaccccccttctacaaggctgaggggaaattgagactcacttttcactgggcattcctccctccccatctccagtattgtgcaaagaagggcctggaacctactgtaatgcctaggatttggggaacacatgctggttgttgttcctttggttgccctagcactgccaaaactgtcacacccgccccgtgacccctccaggcaaaaagatctgctgctctgtgccagatgtgaattacgaatctttatcatggctgggagccctgttcttggggtgctgatggtgcaaggcatgggtcccatttgatcatggaccccatggtcatttcccttccgacttaggagaatcttgcactgctgctccctctgcagtggcctgtaatttaaacatccccagaggcaataggcagaaaataggccactcttgggaagaaaactgggagaccaaatccatgtcactgagtatctatgactatattatcttgccataggaacttataaaataagggtagcaaaagtcctgccaaggaagcactgggtcttagtagtcactagccacatgtggcaatttacatttaaattaattaaaattaaataaaaattcagtttctcagtcaactgttcacatttcaagcacttagttgccacacgtaaccatcgtatggaacacggtagataaggaccatctccgtcatcacaggaagttctgttgcgtggcactggtctgtaacaagcctcacgtgtctccagtagcagttgagggtggccccactattcttgcttattttcttactcggcttagccttagcaatttagaaagtagaatgacgtaagtagaaagccagggggaagtggtgactgcagtgagtcacgttatttctcgagggaccagttctgtgggtagggttggtggagccttgcccgtctttcttgtggtcccaagtgtcgctgagacgcttggacaatccactggaatccctgtttctaagaatccctgtttctttaaatgggtttgggttttatctcatggaatagaatcttggactttatacgagcacatgactatattttttttttgttagggcttcatttcctttggaggaaatgccaagaaggggagtgtggaagaggcgcgactggtttggttctgttaactgtgatgtgtgatgtgcacatttggcggcaggcagacagctggccaggacaaggctgccccggggaagcagtgagcctgtgagcaaattgaagacagatgaaaaggggcacagtggaaaatcacccaagtttcatgccatctgcatgtaccagtaccggcgagacagcaaagagccacactagctcagctcagtaaatagttcgttacatatcagacgttgtatagacaggatatgaaaatggactgagactgcccctgcctgcagccagctctccatctgagaaccctctcagtatgggcttattggaattctccttatttcccttggcctactcactccaaaaagatattccctacttctctcttaatttcagccctaagtaacattctccatctggcaaaatggaaacaaggagaaaattatttgggagttgggaatttgaagaccatgcttgctggctttggctttggaaaagtaggaagcccatggaactgagctgctggtccttgaatgaaaaggaagacactgctgtttttgtcctgctctgcatgtggtcagtcccctccctccctgcccaccgcaggtatttttgcttcattgccttgttcacgtttttgctttgtaggcacttccctatgccagtgcccctgtgcattcatcatctccatccttaattgctttaagaagccttttgagaatcgccctggggtgcctgcatagcagctgcagcagtagggcagacggtcttgtgggtgtgaacagagttggttgttggctttcttctgcatgactttggtgtcgattctgaacgggactccagagatgttttgagggtggcactaccatggcctcccaggaagcctgctgtggaaatgcagcacttactgggcacagaaggtcttgggcatttctgttaattagactccacattatgggtaggataagggagccggctcattcatgtaatgcccagagactaggatgatggctcaacagaatcagagcatccctgtttttttttctatattggaggatagcttttttcccttctcttctcaccactcgcttggctccctcctctcttcttacctgatgactttgtctttggctgggagcaatttgcccctgccttatattcgttcttgcataggttgtaggagatgacccctgaatatggtccctccatccaggccacacagcaagtatgctgtgggtctgaggtgcctttgactaacaggcactggatgtcagaacatgaagacctggtcattcccaaacatggctgcagtttagaatcgcctggggagtgtttaaaactcctggtgtccaggtcacagcccatgccaactgcctgggggtgggagccagataacagtttgtcagagatccccgtacaattctgatatgtggcaaattttaaaaattaccgtaggggaagggtgtggtcctttgaggtgtgagcagttacacctgagcataggtccatcttgcatctccacggcaatgtgatgtactagaaatgacattggatgaactctccaacctaccgtcctggtgaccttggcaatctcccaagggcctcagtttcctcctctgtaaattggatcaaaatagtagtacctttctcatagggtcatcttaaagaaccaaagaaatgatgtgtgagtctttggaaatagtaaagtgctaaataaatgcttgtttggccaggcatggtagctcacacctgtaatcccagcactttaggaggccaagacgggaggatggcttgcgcccaagagtttgaggctacagtgagccatgatcacaccactgtactccatcctgagcaacagagcaaggcttcatccctgaatgaatgaatgaatgattacttgttattactagagattattcctctattaaaagatattcattttctaggtggtctgtcaaggtagaagtgactactgtggcattaattctttcatcaccaacaataaacccagtaggtgtttaggataagaattcatttctcctaagaaaggggagcagcaaggagaggtggtctcatgcagcattagaaagaacccaggctggctgctgtggctcacgcctgtaatcccagcactttgggaggctgagatgggtggatcacctgaggtcaggagtttgagaccagcctggccaacatagtgaaaccccgtctgtactaaaaatacaaaaaattagccggccgtggtggtgcgcgcctgtaatcccagctactcaggaggctgaggcagaagaatcgcttgaacctgggaggcagaagttgcagtcagccgagatcgtgccattgcattgcagcctgggcaacaagagtgaaactccgtctcagaacaaaacaaaaaaacaaagaaagaaagaacccagcagctagatcccagcaaactgtggtcccacgatgcccagggaatgctctctggcctcatgttcattggccgtctctaggaatataaggggcctcatggaagagggagggatgtctgtaaaccatcagcttcatcttcaggctttctgttcagttggatttcatttatgtcaaagtggttgcaacaaggcatcactggcaagcgcccgaagagggacaacgggctgtcccatcaccagggctcacctggtcattttcatcggtgtgactgtgttgtctcatggagtaagcatcctcatggctctttgaggtgcacacaaaagcatttttttttcctctgacttgtcctcccagggacttgaagttggacggaggaagacaatcaactggtgcagtgagtttgaaagagatcattggtctggaaggtgtggagctgggtgctgatgggaaggtaaggctgccaggctgccagtcaccaagttgtgctgaaggcacaagggtcaggaagcagaggaggggggcagcccacaagcctctcttgaggtggaggactcgaggtctggggcagattcccaggcatgtgatgccagcctgcccggctcccctagtgtgcagccggtgattgagtagcagcatggcaggagttcccacagcatgtgtatttctctgtcagtgctgtttacaactgaatgtacagttttgagtacctcacacacagacatgttccaggatggaatgacgaatggattgaacatctattaactagtggtgtcagcaagcaatattcaggctactagaaagtgtcatagcttcccatggtcctgggaagctaagagaccctcagtcttacactgtgaccacagagccccagggcggtcacattcctcttccatccacatgcaacgagtcgtggggttgaagtctcaggagtgaaaggttgaaagatgaccctgccctttgtgcagggtccagacggtcctcatcaaccctttcaaaatctgtgtatggcaatgacgcaagtgtttcttggggaatctgtcccggggtagtttgtttgccgatgaggctgctgggagctcaaggtgtagatagagcgcatgtgagatgctcgcctgggcaggtgaaaatcaatgcacttgctctgttcacccctaacgaggaagtgttcccataggagccaggaaggatgggatggagtggagggtcatatgtggcgtctgccagaggagcagggtaggaggccatggccctcaccagggactcttggggcctgaagtgttctgggcttctgcacttggattataaaaagcaatgcagcgtgtgccttgtggattacacaacaccacagcaggtcctgagatagtaccttatagtcaaatacattcacatttcttccatgtaataggaatagtcagacccagtgggataaattaaaactctgtagccttatgtcagttcaggttgggtgttggcaccaatgagtaccaaaacaaatttcatttttcagatctcattgaatttcagaattgcaaataggagaaagtggacctgaatgtggggtgacaactgtagcttgatcagaatgcagagctagcaatgcctgggaataatcactggcctgtttttgtcttcaccttttagactgtttcctatacccaatttctgttacccacaaatgcctttggagcccggagaaataccatagactccacctcctctttctcccagttccgtaacctgagccaccgcagcctctccataggccgggcaagcggcacccaggggagcctcgacacaggtaaccttggcctggctgggtctggtagctcgtggtgggagggaggtgcctccatttacatggggattgagtctccctgtgatgcagactggaagacaggggctcgcaggtgacatgacttttaggaaagcctgatctcaagccatgcaggcccgcaatgaagccgcaggtgatttctctctaatcagatgacccagtcgttgacagcctgagcttccacgtggagagacgccaaggccgtgcacaccatgtagagatggctgtgtctcccagcttccctgaccactcagctccccccaacaatgacctggttctgtcctatattttcatggtgctcaattcggactttaaaaaaaaaaatctgggctctgaagtgcaggttcaggtgtgagagtttcctttgtgcctatcttggtgggtgagctgagttggcggctgaaggaagacttgcatgcttccagctttgctgatcaaacctttgtaagaactggcacgtggagaaaacactttaggaagcagtgccgtgtctactctcagggaaattccaggtggatgtgaagttccctaggtctgcccaagtgctgagttctgaatccctgtcctagtgttccggccacctctgatcgttcgcagctgtgccttggtggccgctctgatttgtattcatacggacacaatagcatgcctggaagtattcgcaccaaatcgtgctgcacaggcgtctccaaatttgatctgcaagtttgaaaaaggaacctcttcggggccacactctgagagtgtcttctgcatcttgcacgctgtgtgaagttttttgctctcctggcccagggagattaagacataattttctaaaatggaaaaaaatgtcaggatgttaacaatttggtgaacccttttaagaggagaatccacttcactggcacacggagatgtctaataaaagtcagtgagtgccgtgacgttgagctaagtgccctaaagccagcctttcttcattccagctatacttggcattctcctggctgtctctgctggggagggtccggagccgctaattatcattttgcattttgcatgtgatcttcaggtagtgacctgggagactttatggactatgacccaaatctcttggatgacccccagtggccttgtggcaaacacaaacgcgttctgatcttcccttcctacatggtgagtagcgtggaatggaggctccgtttgctgcaccgtcagttgccccacctgggttggtggccggctgggggcttgttcaaagactgctctgcctgggggaccttcatgaggagctccccggtgtgggtgcccacggaaggaccagtattgcctcctgtccagaatcctgctggccacctggcctgcaaacaccactttcaaggctgggctgccagtgtccacaaagtcaccagctcaggttgggggaccctctcctctgaagggggatgtccgagcttatacctccacaaacccccgtggagaggaccaggcccatccctggtagcgctgagttcaagtccagctccgtttggagttccttggtggctgcaggccttcgtgtgcatgctgagcaaacatttggccccaggctggggatgacagaattctctcctgggaaagtgaaagtaggacactgtgggtgttacatgcaaaacctttctctgctgtttttatttcatggactcttcctgtttttccctgtgtgtaattttggtttctgctctcggctgaccactgtttcccaccaccaagggctgccatctcctctgcagacaccagaggggcctggcggggccctgggcgctttctctgggccgacttgccctgactcttgcggcaagcagagccccgcctgctgtgggaggagggggagctgcactttcagaacagtcgattggccaggcctgccatgcacagcatcaggtgggagacatccacccagaatgcccccaccacctccctgcgttttgcatgtcctggcccatgagccgggcctggcggggccggcacagccgagcgcttcctcctctggttccctccctcctgtgctcccagcctgagctgttctctggagccccagccttaggagtgaaccagggggtcttttttctcccctcggcttttgtgtctgcagtagccagagtggaaaccaatcccccgtactcaaaggaaacccagatcttcattcagaactgagggttctccgctgtttgtcagagaaacaccaggcagaacttggggccttgccagttactttcagcacttatcctcttgttctttggcacatagttcagtggtcattttcgtatgccacacggcgtcagaatgcatttagtcattggagaatttattcaagtcaaaggcatttagtttgaaattgccgcttctcctcactctccctcactcatgccccaacttctaacacagaaagcaaaatcagagtcatgtataattacttttcttccactctatgatctgtttatttaaaaaaccagggcatattcatctttggcagaggcaagcacgtaataagtgttcaataaatgaccagaatgattgccctgatgtcaaggagggagcaactggtgtaagaataaggatgctttatgtggttcactgccttacttattaaaattcactttatttattaagcaacatggccaggaaactggctcagggagtccaagtgaggctttcctagttgatagacaggaaatgggggatccaggctagagctcctggctcgaggctgttttcacgttgcccagctgtctctgaattccacattcctcagcagtcagccccacaactgccgacctcggggttggacatgaagatcattctttgggccaacagtgtagcagatttctaggtaaccaagagaataggaaggtacactatttcgatgttggcgggagctgtcctaacagacacgtgcctggtgataatgccgacctctccttttataggcctagtgttgggctggtgctagatctgatcttttttatctgatcttttttttctttaaatgatttcattgtgagccttgaggttccaggccgcagtatgtgtgtatgtgcgtgtgcacgtatacacatacaacttttcctccttagactgtgctagaagacttgccaagtcagcatgtatgtcctgccctcctcatttgatgttcccaagtggatcatttttaatttcactgcattggctctgcagtcagtgcttctgggaatagtccatgctatagagaatggaattgcgcatggactgcattttcctggtcggctcctggagacctatgtttcctattctggccacagatgttggcactttgataaaatgtgggaaatccacgtttcagaattctcgtctaagttcttgacagtgtgttgtgtattacaaagggcctcaaccccccagctccctggagacttctttcctagaagccgacatgggttacaggccgtttctcatgcatttgcattgaacttgtaggaaacagagtggggcagttgggggtgggggcgctggggtgtttgctttatttttgtgtgttggggaacaggtatagaattcgcctgttgaaccaagtattgattgaggccttattatgagccaagcttccttacccagtagagaactaaccagccacaacccctcttctcctccaccttggagtgagtggggatgtcagagagtaaacagtaaacaaggagacagagcaccataatcgtgaggaaggaaccatcttagaaaagcagcaggagaccaggcatggtggctcacgcctgtaatcccagaactttgggaggccaaggcaggtggatcacctgaggtcaggagtttgggaccagcctggccaacgtggtaaaaccccatctctactaaaaataaaaaaattagccaggtgtggtgttgcgcgcctgtagtcccagctactggagaggctgaggtgggagaattgcttgaacccaggaggcagaggctgcagtgagctgagattgtgccactgcactccagcctggacaataaagcaagaccctgtctcaacaaaacaaaacaaaaacagcggcaggaaatgatggaagggttggacgtgggccccagggggtaggcctcaaggaagacttccccgaggaatggcactgaagcaagcactgagggctgagagtggttggccccaccaggttttggtagggagagcccagtggaaagaccccaaagtaggaagggggttggttttgcataaaatagatttttctaactgtagaagtcgttgcccttccccctacacacacacaggcaggaggcagagcccacaaatgatgatgccgacaaaccctccctccccactgactcggccccaggcacagggagctgccgctgaaacaggccctggctccaaagaccctggctcctttgagccaggttgtggaatgccctctttgagggcctggggcacatttggccactaggctagtgtgaggatctctgcccagacagagggcagattccctcctgggtgggaatgctcagtgattggggaaggagcaggcttgttggtcacaggccaattatgcagagctgctcacctcccttagtattagcttccaaagccccagagtcctgctgcctgtcccgtcttcctcgggcccccagggcagtccaatgtggccagcccagcagaggcgcccacctgaaatcctgggactgtcctcccctgttttgggatgtcctgttcctgtggaaatcagactctgagatgcctctgctgaatgaagcagctctcaaagtgatgagctaatcctttcacccatcaaatcctgctgcagccgctaaaaggagtaatttacagacaatcagatgcacttgtttgtttgaagtgtgcatttccatgaattctgtaaccactgctctgatccagatatagagcatttctgtccctgcagaaagttctcctccccatcccattcttcccatccccttcctgcaaaagcaattactattctcacttctgtcaccatagattagttttacctattctgaaacttcatgtgaataggatcatggcatatactttttggggtccatcttccttcatacaacttaacatgtgagatttccccatgtcatgtgtgtcagtagatttttttttttaattgctgagtgggccacgtgcagtggatcacgcctataaatcccagcactttgggaggccgaggtgggtaaggtggggggatcacttgaggtcaagagtttaagaccagcctggctaacgtgatgaaactctgtctctactaaaaatacaaaaattagctgggcatagtggcaggcacctgtaatcccagctaccctgcaggctgaggcaggagaatcgcttaaacccgggaggtggaggttgcagtgagccgagatcacactattcacttcagcctgggcgacaagcgaaactacgtctcaaaaaaataaaaataaaaatgctcagtgatataagatgtagtacagtttgtttatccctcctcctgttgatagatatttgttcatgcggctgccatgaatgttcttgtgcatggctttctgtggaaatactttttaatttctcttggggtaaatacctaggagtgggacttctgagtcctggtgtaggtgatattaaccagccatgatgtagctgaatgtttatctttgtgcgtgtgtgtcctaagtgtaatataaaaaggcccctcgtcgccacagtcaggacatgtcttagagtgggaagcttccagaggtgaagcctgtcatttagtgtgcaagtggcacccttttcaaattagccttgcacccatatctgtatttttaaactttgatccatgcaagtcactcccactgttacctactgtagaaggtcaagggtgagattttgaacttaaaaaaaaattccgggccaggtgcagtggctcacgcctgtaatccctgcactttggaaggccgaggcgggtggatcacctgaggtcaggagttcaagagcagcctgaccaacgtggtgaaacaccatctttactaaaaatacaacaaaatgagccaggtgtagtggcaggcgcctgtaatcctggctactcaggaggctgaggcaggagaatcgcttgaacccaggaggcagaagttgcagtgagctgagatcacactattgcactccagcctgggtgacgagaatgaaactctgtctcaaaaaaaaaattcctggggcaggtgtgcaaaacaaattgcagctggcccggtggtttggtcttcaagtttctagaaggtgaccacagaacagagaatgttgagccacctggctacgtgcagactcttgctgggtgatggtgtgtctcaggggagggcggatgcttccagctctctgcacctcttggcatataattaaagcttcatgagagagtggttatgtatcattagaacgtggcagcccaggtcggtagtgggtttttgtgtttttttccccctctttatgggtgtggaaggcaattaagaggagaaagtaagtgggagagctgagataatgccaacaaaattcagttacctgaatggatttctggattcttttcttctgtaagaaatccctcttgcactgtgttcacatcaaaaagaaaaccgactaacattgtttatgatatgcataagcatgtaaacctcaagagaaacctcttggattaatctccatgataaaatgcctattttttatttaccgaatattaaaatctaagtacttgtagagaaagccctccctctacccctacatctccccagtgttgggggaatgtatcatagaacttaatttttcagtacagcatgagatgctgagcagtgggaagtaattgactcaatgaaagaaagactaattcagccttccatgaggtaggtgattagattctgcctgtcccccaatatacatacagtataaatatatatttataaatatagataagttataatttaataacatactcatatatttattataatttatatagaatatagaactatatatatatctatttccattaaaagttacctggatgatttaggcacttgttacctgtctgcagggtggatttgttgggaagctaatgcaagaccctttccatggcctcaggtttcaaggtgcctgaggcttattcagttctgaggagggggcctctttaagaaaatgtcacatcacattagaagcacagtagctccgcacttccctattattgtggcacttccctgaggcttgaagggcgccctcaggcgcacaggcctgggcagtagctgaggagcatcctgccagctttaggttaagtgttcacatcaaggcctgaaatgcctgattgtgctgtgtgggggagggagggttgttttgggtgtgggtttggtgtttttttttttttttttttttggtctttttgttgttgttaacagcactattagaattccaacaccatacaattcacctctttaaagcctcttttacaattcatttttttctcataaaactaacacaggcctcggtggctcatgcctgtaatcccagcactttgggaggccaaggcgggtggatcacctgaggtcaggagtttgagaccattctggccaacatggcaaaaccgtctctactaaaaaatacaaaaattagccaggtgtggtggcaggtgcctgtaatcccagttactcaggaggctgaggcaggagaatcgcttgaacccgggaggcagaggttgcagtgagccgagatcacgccactgtaccccggcctgggcgataagaccaagactccgtttcaaaaaaaaaaaaaaaaaactaatacaaaacaagagtttgacatttcacccaagattttgcagcatctgctctctatgtatttgtctcagatttttgacagtcgcttcgtgattttgacatttcacccaggatattgcaacatctgctctctttctatgtatttgtctcggatttttgacaatcacttcgtgattttgaacatgacgttccacgcagtttggctcattctctactgccactgtttcagcagcttgcgtttagaagtgcatccaaatactctctgggtgtgggtgatctcagggccagtcacctggtgtcatctcaagtggatggagacactactccaggagtcctgtagcaccagataaatagttgacaaatatttgacactgaacatgctctgtgccacccagtgaatccccatggccatgtaaacctgaagcagagagagcttttcttcctgtgttcctctccgtgtgcaaaccctttcatttcagtgggagggagagttgatccaggattcggtattttgaattcgatgggtagaaatagcaacaaatgcagccccaggctgcgtaggctacccgtttatttccatagtttccttgtgatttactgtcctctaagggaaaggattaaatgcctagaacagctgaaatgcccatctgttggtggttagatagatttagtcgagggccaccgttgcttaattaccttaacaagcacggaacagctgctttccagtgcccagctgagcccgaatgccggtatacaagtatggccaaagcaaaagagcctaatttcgcagtggctgttggcgctggaaggagctgtgtggctcattgccttgtatccttccttcctttcacaggcgtggtgtggaaccaaggcttgcagcggctgcatacctgccccaggtcttacagctagctcctggggtgcaggcagcactagggctggcagtaggtcagagaacagtggccgagtgtacggcaagctcacatctgcttagaactgctcataagaattcctggggaaacttgaagacaggaaagtaggaaatgaaggaggccggagctttatccgccctagagcggaagtaccttttctgttgtttctgttggaatcagaccaacaacctgtctgctctgagaccctcactgttctccaggattgtttttgaggtgtgtgtacctcccatcccctcccgttataccccagcccacctgaggggcattcacttcacagcattgttaccgtgggccaggatggggcccaagttcagttccatggaggccccttccctcttctcatgacaagtcaagactttgtttttgtacaaagcaaaggatgggccgggcgtagtgcctcatgcctgtaaccccaacgctttgggaggctgaggtgggcggatcacttgaggtcaggagttggagaccagcctagccaacatggcgaaaccccatctctaccaaaaaatacaaaaaaaatagccaggcgtggtggcgtgcacctgtagtcccagctacttgggagactgaggcacgagaatcgcttgaacccgggaggcggaagttgcagtgagtgccactgtactccatcctgggcaacagagtcacccatcctgtctcaaaaaaaaaaaaaaaaagcgaaataggtatcagtgtttctgcagtcgatatgggagacttttcatctggataactaagttgtggtcttctcttttcctgttatctcagaaggaatttgtctactcccactctagcccttccagactgtctccagcagggcaggccaggcagggcctccttgtgaactgcatctctggacatctgtgttgtggacagtgccttccatctgaccttctcctttccctgtacgcagctgtgcacacagcttccctgcagccaggcattcaagtgctcgacagtgcattcaagtgacctctcgctccatgagcggaatgagcacccttgcaaaaaacacaactgcctgctgcagggttagaaccccccatccatcacacagcctgggcctgctgcgggccacaaggagcccttcatctggtgaatcccatggcctggagttaggtggcattgaaaacagtggtcccggccgggcacggtggctcacgcctgtaatcccagcactttgagaggccaaggtgggcagatcacgaggtcaggagatcgagaccatcctggccaacggtgtaaccctgtctctactaaaaatgcaaaaattagccgggtgtggtggtgcacacctgttgtcccagctactcaggaggctgaggcaaaagaatcgcttgaacctgggaggcagaggctgcagtgagcagagatcacaccactgcacactccagcctaggtgacagagtgagactccatctcaaaaaaaaaaaagaaaacagtggtcactcagactgtcccaggccaagaaggagtcgctgcttgtttaattagcactttgatttacagtagcatgcactggcaaaacccaggcattgcaagtttttgttttttggttttttttttgagacggagtcttgctctgtcgcccaggctgaagtgcagtggcaagatcttggctcactgcaagctccgcctcccgggttcacgccattctcctgcgtcagcctcccaagtagctgggactacaggcacccgccaccacacccggctaattttttgtgtttttagtagagatggggtttcaccgtgttagccaggatggtctcgatctcctgaccttgtgatccgcccaccttggcctcccaaagtgctgggattatatgcttgagccaccgcacccggccagttttttcgtttttgtttttgagacagtctcactctgtcacccaggctagagagcagtggcaccatcttggctcacttcaatcttcatctcccaggttcaagcgattcttcctgccttagcctcccaagtagctgaggctataggcatgcaccaccacgcccagctaatttttgtatttttagtagagacggggttttaccatgttggccaagctggtctcgaactcctgacctcaagtgatctgcctgcctcagcctcctaaagtgctggggttacaggtaagagccaccatgcccagcttgcaagtttttataattcatacaattcaaacctgaataaagcattggcctgacttttcatttcttcagtcccacaccagaaagaatgagtggctgaggggctgtggtaatcccactgccgtggctcaatctcctagtacagcctccccagctcacccccagcactaaagagaggatgccatctcttggcatggttgggaggcccggcctctaagggccaccatcaggctccctcaagacaggatgtgccggagaatcatgacctcctgtacaccagagagtgtttctcagaaggacctgcagctgagaggacatcgaggactgtcatcccctctggaacctgcctggaaagggtggccctgggctcagagtgatccgtccagtttccatactctgaacagtgtggggctggtgcagagcagtggcctcaagatgcagcttatgtgctgggccccttccaagccaggatctggcagccagtgccactttgggggttgcctggtccgctgtggcagttgtgtatcccatgcagctgagcgggagcaggacacggaacagccccacagatcaggtgcctgccgctgtcgacatcaagtggatgctggagaagccagaggagcaaacggaggcacagagctcctaaccagtgtgcactgggccgccgggcaccatgtgtcagagctggagtttgaatccaggactctggctcttgagcctgtgttcttccccactgagccgcagctcagagaagcagggacaaaagcaagactgaagagagcacagcagacaggaggccaggacagaaggccgggatgcagaagagtctgtcacctagaagatgactggagagcctcgtcctcctggtgctgccacatattccccacttacgcggggccaagcactgggctccctgggccaagggtctcgcagcatctgctcatgggccctccctgcccactccctgccagggcctagcttggatttttccccgcctctctgtcaggaaacggagtccccagctgcagaccccaagagctaggacaaggctgcttgtaaaaaagacagagcctctcccgcaagacccgggccagagtgggcctggcgcgctctgccacccttgccccctccagagccgcaggctgagctgagctgttggctctcaggggtcctctaaataaaaatgggtcagggagtgtggcgcaggggcaggggcaggactcagactcaacggatcggatatcgtcagtgcctttatggggatcagaagctctttctctgtccccgccttcaccgagccaggttcagtttcagtagtggtaaatgcaatcagcagaatacagcgtgtgcagcaggcatggttcagttctgaagtgcagcatccactctagcaagtttaagaagaaagaggagccggtgcaggggcgcaggtctgcagccccgaccactcaggaggcagaggcaggaggatcacttggcccaggatttagcgtcccacctggcaatgtagcaagaccctatgtcttttttttttttttttttttttttttaaaaaaaggctggacgtggtggctcatgcctgtaatcccagcactttgggaggccgaggcgggtggatcacttgaggccaggagtttgagaccagcctgaccaacatggtgaaaccccatctctactaaaaatacagctgggtgggtgtggtggcgcatgcctgtaatcccagctacttgggaggctgaggcaggagaatcgcttgaacccaggaggcagggtgtgcagtgatctgagatcacaccattgcactccagcctgggcaacaagagcgaaactccatctcaacaaaaaagaagaagaaaggtatctaataaacaccttacttactagaatcattgaggaggctgacagaataacctaagttggcatttcaggaatgatccacaagccacactgtagaactgtgccacccaggaggctgcagctgcctgggaccaggactctggctttggacttgggaaactggcgctggcactggctgctggctccagatccgtgctgctctgctgtgctctacacctgccaaatgaggacccagaagcttagtgacaggacttgaggattcctgccctgagcctcttggcagcagaaacagcagaaccacagcccttgctccagccctgccttcacatatcagagcatccaataggaggagccagaattgtttttggaatcctagctgcaaaggagtcagggaagtgtaactgttagctttccagcctccgtagcacaacagggcatcccaggaggaggttggatgttcagataatagagtagaatggaggcgagtcctggggagaagcagcctcagccccgggggtttaggaggaggagcctgcagaagtggccaaaccaggagtgggcaatagccagacaaggagaatctgatttggaagccctgggtctttggcacatagaaatcagctggaaaacttgtcatggtgcaggtgcgaggccccaccctcagagactgtgactcagtggggctggagcagagtccagacttgctgcgtctcctgctttgtgctcctgatgaaatttttcagcgtcttttacgtacgttttgttctctttgatcttcaagataaacctgggaagcagccccatcaggttttctcatctcatctcgttttggaggatgagggtgaggctcagggaggttgagtgactttctccctgttgcctgatttgctgaaggtggacctgaccccccgcccccgacagccctttccactgctagcgatcttctcggacatcctggtgagagcccttgtctagggagctactctgtgctgcttattcagtaccatgaaggagagaaaagcaggaaggcagtgcatggggcacgagctggaagcagccactctgggagaccaggatcccagcgctggcccctgcctgcggctcactcaggtctggggtgagccttttcacttttctgagcctctgttgcaaacagaggtgggacacatttgtatatttgcacatttaagcagtgagagctctctttcaagggaagtgttatatctacaaataagatggagcaaagcagagctgctgtggttgctgcgaggagagatccagtcccctcccacaggcacttcaacagaacccagcctgaaaatccacatgatcgttaagcagcaggatatccttgctggtgctcacagggcgtcaggcccccaacaaaggcagatgactttacttgagcctgctcacatcattgcaaacctcatgactttcctctgtagaggaagagtagaagcggcctgtctctgggagttcagggtgcctggattggggggtgaggggttgagaagctggaggaaggtgctgatgacttgggaaacaggagggttggctgatgggccctcccagcttgaggcgagcatgttagatgtggcccccattctactgcctatttccaaaatgaaatcttacgtccccttcaacccagagatttaacccagaggagacatttgttggagatgaaatagagcctttcttaaaagtagaagggaaataaacctgtcttggagggctgccacaggggtccactctgctggaccttggcagtgagagcagtgtccaaatactgtggccctgcacagctgggctgcccctttcctggtccttgcagggcatgtggttagccgggaccagaatggccacatctggaccaggtcaggagaccttcctgattgggccagaaagactatgtatcagaggaggaagaagtggcattgcatccaccaagtcctcttccagccaagtgttcgaaaactctgaacaggtctggtggaattgttggagttaatattgctgtgctttgcctttattcaccagagaagcaaagagaggaccatcaagatcacttgaacggggatgtgctggctgcttgcctcctccttgctactaactgacaccaaagacattgtacatgtctgtgctaaaatcctgtgtcctataaatggaggtgtccagagaaagccaccaacttccattagagctgttaaggaaacctttgatgggctttgcgggcatgagtcatccagggaatcgaccttcacatcaaaatctgtcatttcttctttcctgagctttgactgattaagattatggcatgtaggccgggcacggttgctcatgcctgtaatgccagcactttgggaggcagaggcaggtggatcacctgaagtcaggagttcaagaggagcccagccaacatggcgaacccccatttactaaaaatacaaaaattagctgggcaaggtggcacatgcctgtagttccagctactcggaaggctgaggcaggagaattgcttaaacccaagaggcggaggttgcagtgagccgagattgcgccactgtactccagcttgggcaacagagcatgactccgtctcaaaaaaaataaaaaaagattatggcgtgtagtcagccaaaaaagacccagccttggcaagtatactctcgaggagggatgagatgaactggaggaaacccagaaaaaaattgtttaattcagagttcacagtgcagggtacagaggagcaaggaagaccagggtattcagaaaggactccaaggatcctttaaggatttctccaatttagaaagagggaaggagggaggaggaaactcaagtttccaaagacttactggttaccattatatacatatggtggcatgttgttcaaccttaaaggaaattctgacacatgctacaatgagattgacccttgaagactccatagtaggccaggcgcggtggctcacgcctgtaatcccagaactttgggaggccgaggcaggcagatcacctgatgtcaggagttcgagaccaacctggccaacatggtgaaactcagtctctcttaaaaatacaaaaattagctgggtgtgatggtgggcgcctgtatttccagctactcaggaagctgagacaggagaatcgcttgaacccgggaggcggaggttgcagcgaaccaagattgcaccgctgcactccagcctgggcaacaaagtgagactccgtctcaaaaaaaaaaaaaaagactccatgctaaataaaataagcctatgacaaaaggacaaatagacgattccacttacataaggcaaatttatagagacataaagtggagtagtggttgccaggagctggagggagtggatggggagttggcatttaatgggcagagtgtttcaattgggaagatgaaaagattctgtggacagatggtggtgagggctgcacaactatgcgaatgttcttaatgccactgaatggtacgcctagaaatggttaagatggtaaattgtatgtgatgtgtattttaccaccatttaaaaaactaaaagaacattagctaacatgtattgagcacttgctgtaggccaggcactgtacagggcacttctcatacagttctcagaaagctgcgtgaagtaggcactgttactgttttttgtttacagacatgggacttgagatttggggtgatttgaagtctcccaaagccgtcagactagtgaatggtcaagtggagattgaacccaggtctgtgcacatccaagccccacgcgcttaagccccataccgtgtgaacaggctgacacctgggaactgacacaggcacccctccctctcaggcactgacttctgatggtctacaggccggctttcctaagtgtcacctcatcctaatagtggtgacttgttttccgttcgcctccagaaggccacagtccccttcaggctcctggattccgccgagcccttgttgtagctccaatgcaagttttcccgttgctcatggctttgggagttgtaagttggtcgtagttggtgcataattattacatacgacccttgttttaaggagtgatccgtgttcccctgtctgttacagacaacagtgattgactacgtgaagccctcggatctcaagaaggacatgaacgagaccttcaaggagaagtttcctcacattaagctgacactcagcaaaattaggaggtacgggaggctggacttgcctgtgacctttccctgcaaacccctctttccacacaccgtaagcttgtcatctgtccagtggtccttcctgtggttccagtgattgagtcattgtcacattcagcagaaaggacagccgggcatggtggctcacacctgtaatcccagcactttgggaggccgaagtgggcggatcacctgaggtcaggggcttgagaccagcctggcccacatggtgaaatcccgtctctactaaaaatttaaaaattagccaggcatggtggtgcacgcctgtaagcacagctacttgggaggctgaggcaggagaattgcttgaacccaggaggtggaggttgcagtgagccaagatcgtgccactgcactccagcctggaaaacagagtgagactccatctcaaaagaaaaacaaaaaaagtaaacatgttttatacgacctgaccaacagagaagaggccaaagcccagctatgtaaatctgctccccatgcataacgcagccttcacactcccagggacttaatcccagtccagatcaccctctgggaaagagaaagagaaaaagcattcaagatgggggagtttttctgtccactgaaactctaagttttcacaagactgttccctcttgcctgtctttctccagtctgaaacgagagatgcggaagcttgcgcaggaggactgtggccttgaggagcccacggtggccatggccttcgtctactttgaaaagctcgccctcaaggggaaactcaacaaacagaaccggaagctgtgtgctggggcatgtgtgctgttagcagccaaaattggaagtgacctcaaaaaacacgaagtcaagcatttaattgacgtaagtagcctttttcctggtggctggaggagcacatgctccggtccggggttcctctctcagaaggattcggtcagtgaccctgcctggaaggattctgatccttagtcagcaattgaggtgaaggctatgaagtctttcccatagtgggaatagtcaggctatcttaaaacatagggatgatctactttgacaagaccaaagctcctcagcattgggtctggccctcaaagtccattctcagacaccatgtgagatgcaatcattcccacagccatagaagccactgtacctgcaagggattcccccaggcagtgtgacccacagagcatctaatgtcaaacaggttgcttcagtaagaccttggcttcctacttccttagctggctcctctttggggaaaggcgtgagtttgacaaggtggtatctcttttctttaaaaggagagccctagcaaagcaaggaaacatcgatctccttggatggctacatgaatgcctgttttagaattcaatatattaatagaaaattttgaggtacagtaaagccaactgattagaagacagatccattgagaagatagtttgttacagttcccaagaggagtagtatcttggctggtgctgccataacaaaataccataggctggatggctgaaatgacaaatgtatttctcatagttttggaggctgggaagtccagggtcaagggaccagttgcttcagttctggtgaggttcctctccttgctcatgggcatcttcttgcccatccttaattgcagagaaagacaaaaagcaagcactctggtttcttcttctaaggctctgaatcccttcactccatgcccaggacctcatctagacctaatcactcccaaaggccccatctcctaataccatcacatgaaggattagggcatccacatacgaatttggggggacacaaacattcagcccataacaaggggcatgccatgctgtgggggctgtgtatggaagccctggaattggtcgggaggcagagggagccttgattgtggttttcacagaaaggaataggtaaggcagggtttgtgggtttaggattggctagtttgaatagttttgatgggctgtggggcctagggtctgtccctaattgtctggtgcctggctctggggtgataagggcaggtggatagtggcctggagtgtgaggcccatggaggaggtggtgggaatgtggcatctggattggttggtttgcatttgaagagcaaaaggggtcactgtggaggatttggctaaccctgggaagggcagtccctctagagtcagcaaggccccagatatcaaagcatcagaatacagaaaataaaagacatggttaagtcagtgcccccatatgtctcacttgtctagctgtcttcagtggcaaaggcaaaaaagcagaaagggcactaaggtaggtactccccaattgaaaagagtattttttaggtcggcgctttacagattttaagaaatggtacaaaatcatctagcttatacagtaaatacatgaacccagaagtgaccattggacaccaactctgagctgagaatcagtaggcttatacagacatctgctgaactaatgattttttttttttttttttttgagacagggtctcactctgtcacccagactggagtgcagtggcacaatcatagctcactgcagcctccacctcccagactcaagcaatcctcccatctccgcctcccaagtagctggaactacaggcatgtaccactgcgcctggctaattttttttattttttatagagaccaggtcttgctgtattgcccaggctagtctcgaactcctggcctcaagctatcctttcacctcaacctcccaaagtactgggattttaggcgtgagtcaccatacccggccaagaattaatgaatcttttgatgtaacagatatttataaaattataaataatatgcacatttaatcatagttgagcaatataccacacagcaaaagctgactttaccttattcaaggtgcctctatcacctgaactacaaaatgcccttggccttccttacatggggtgaggccttcctcactattgatgcagaatataacagtaatggtttgaccagccacttacggtagcaagaaacctaactcaaggtctcatcccagttatgatctgaaagcagtcaacatctgctctgtgggtaggatttattttattaagacaaaagctgggttgacgccaaggcagaatgtgcctgagcaaacatgaggccctccctgtccatccccaccttggtggttctccttcctttccagctccagcagcccctctagttgggtgggcacgcaagatgccaccaggctcagccctgtttagatacacagcaactgtgtagcactgtgaaagtggagacttcccgaggacttagatccttgtaagatgaaaggactgaactacatagaatcagtgcactcccttctgaacttaccacgtggtttttattgtcgtgcgtggtttgctttattatttttatttattttttgagacagcatcttgctttgttgcccaggctggagttcggtggcacaatcttgactcactgcaacctccacctcccgggttcaagtgagtctcctgcttcaacctcccgaggagctgggattacaggcgcccaccgccacgcccggctcatttttgttatttttagtagagacgacagggtttcaccatgttgcccaggctggtctcaaactcccgacctcaagtgatccacccacctcggcctcccaaggtgctgggatgacaggcgtgagccaccaccggtttgctttattttcagtcttccctttaaacctgaatcacttagttgccacaggtagagtttgagtcccagttagggtggactcttagtgctgcaattggctacacatgtgaccctggctaagctctctgacttcttggagcccgttttctcatctgtaaaatagagatacggagcatgaaccatgtcatattcctgagaggattaaatgatgtcataagatgtatgtgtggttccgggcagcccctcgggaaaggagcagctccttcacaaccaggaccgaaggcaggaagcacagcctgtgcctccctttcttcctccacagagctttgcccaaagtggatttctcctgagcactcactggctggtggatagagaagctgcaattgcagaaagactaggattttaatttcaaaatgaacatgcttttgattttctttttgttgcagaaactggaagagaagttccggctgaacaggcgagaactgattgcctttgaattcccggtgttagtggccttggaattcgccctccacttgcccgagcacgaagtcatgccccactacagacggctggtccagagttcctagcactggccccgaggacagccaagggccatttcttctcagcttggtggagcagcacttacttactactggaaatgaaaaaaagtagaactcagaataccagacttttcttcctctcgacatagtttggggagaagcagtactagaaactttccaaggagtcttgggtgtgtagccaagaggagccatgagctatggactcctcaagcacgggaagaggaggtgtgtgctgagaacagagaggccctgccctctgtccactagcgagaatccctagctgccccagcccagtctttctccccggcattcacaaactttgcaagcgtggtccagggccttctccagatctgttccaacttggagtgtgaagggcttgagcatacgggggaagagagtctgcagaagttgggggaaaacttttaaaagataccctcattgtgtcaaagagtgtgccaatctatttttgtatcagcattggaagtgcactttcccctggggcgtgtgggtgtgtgaatgtgcaagtgtctgagagatactgcatcagccctagacccccagagccagtcccgccctttacagagcagcccttagcctggggccatgggtcaggctgaccttcaacaattatttctagatgatttctggataagaattgctctctcggtaccagacagtttgacatcctccacccttagaaaatgactgacattgttttgttactgctcctacccaccaaggggataaagaaggcgagttctgagtgttggatgagtcagtcgcgtggaaggacgtggagcgtggcgctctgtaacttcctgccgtctgccaccccgccacgtgtatttaaccctcgcactttctccactgtggagatggctggggcggcgccccacagtgtgtattcctgtcctctatgttagagtgcatcagaagcacatttactgtgctatctatatcgctatataaaagtgttttataaaaacccagaataggagcacgacgcatgattggtgtttgaggcgtttgccagctgggacaaactgcgtttggagctgtggttaagctgactaaggaggcggtggctctttcttaacattcccacgtgcccagggctgttcatgcaagattttaatggtgacttgtcctggcttactgggacagtctgtatgaggcatgtcaccacactgtcgcctcatagctgcaagagagaggcaccagctgaagttcccctgactgaagagagcctgtggccatgtaaaaagagaattaaactcttgttgctttttgtatacctgtatgcgtttgtgtagacgtgtgtctcaccagtcacctttgccctgcattgctgatccccttgcgcacactgattctagtgaggtcacagattcggagcttcacacaccagcccagagaaagggcgatggaaccgaaccgagggtctgcagctttcgttagcagagctgtcagattcttgacagtcttggaggatggagaaattcaagcagcagctggtgagggccaaaacagaatacttggcttcttcagaatcttagattgcactgagtttagtcctaaatattttgctaacaaatttccttggccagaatcagttgtaagacagtgatttgggtggtggggggagggaggagggagaggatatgattaatgtggtctctttggctgatcgaaagctagatcaactggtacttagggcacttgctgtttataaagcaaaattgagaaaatattcaaggtgcctccatcgcctgaactacaaaatgcccttggccttcctcacatggggtctgtcaccttgcatctctgataagccatccaccttcctggtcagtgcctacagggggagagcctttctgagaagcaggtcctgtggtatctgagaatggtctagagagctccccactgcccatctgcccccgaatttcctgccaagctctggggagtggggtggggggagggacgtccgatggatgacaggccgccagcccagacgtggggagagaagcctgagtcctttcctgtgtgataaaatcaggctaatttacttggatttggggtgatttgtttggtttttagcatttatgaggtgagcccatgaagttagtggtccattactttttaaagatgcattttcattttaaactgtctcctggcctgtggatttgtggaatggacagttttgtgggttttaatttatttgtgaggagtcggggctgagaaggcattttatcaggaggtctccttttgcacgtccatgacatgagcttttcggaggcaaaggaagtggaggagggtgagagatgcaggtcactgccagaggcacctctgtgacacggaacattccagacacgtcgcagccttgggcttcggcgaggaggaagtctgagcctgtgaagcgagaaggccaggcagtagactggctctgaggttttgccctttgacctcctccacagagggcagcttcagccccttgtaagccctgccccctctcaggactgccctgaggcctctccagtcctccccacactcagagatctgtggggaagctccgcccagccacactccttgggataatactagccggttctgcctgattccttttcccccggagccagcctagggggcccgggactcctctagtgagccttgactgttaggtaagagacaggaagcagacaagccaagaggttgctgcagctgcccccaggaggaaacgggcagcagggagtgtggcccagcccccactgtacccctccaggggcccgagcccttgccagcccaatgacaccttgaagtcaccacttttcctttcttgcccgctaataaaacctatttaaacaggaaattcataccaaatgcaaatgggttttgttttccttggcattttgttgttccgatcacagatttccctgccagggtgtctgtggttatcagctgcaggctcagcttggggcggccgcttcacacaagccactctgtaccacgtgccctaccttagtgacgggagtaaggagcttccttcccctccatgtcattccttcctgttcccttcattccccaacagcaaataaaactgttgaatgctctggctgctgagttctttatctctcactcagacgtttccggcttagtgctgaacagctggccccttgccctccccagccctggctgcctcccgtgactcctgagagcctgaagcctttctgccctgctgcaagcttaagtgggtggggtggggggaggctggagaatgaagtgcatttgagccaggtggttttgttacctgttcagcaacaaaagacatctttcaaatcaagggggatttttggggttggggatgggggcgcgccctgacgtcacctccccggggctgttggcacagttgggtaagcacagtgctgagggccagcaagagcagggagtaaactgagtgtaaatctggaatcacatcaccaacaccaatgtcaataaaaagcagcttccagtcatgcagctgcaaagcaaagctgagattcaaagctggaaaagaagaaaaatggcaggtgaaggggaaaggtcctcttgccacctgcacacagcccagcggaagggacccaggccaggatgggaaggggtgctatctaagagcccccaccccataaagggccctttagacttcgaaataggtagtccagaaaggctgcaaacctaagactggcaaaaccacaaagaaatgcctcgcgagtactgtgcttcctcacacacagacttcttgacttcagatgacacatcatctatacaacatcaatacacctagtacggctaggtgtggtggcttacacctgtagtcccagctactcaggaagctaagacagaaggatcacttgatcccaggagttcaaggctgcagtgagctaggatcattccaccttattccagtctgggcaacagagcaagaccatgtctctattttgttttttaagggctgggtggggcaggcacagtggctcacacctgtaatcccagcactctgggaggccgaggtgggtggattgcttgacaccagcctgggcaacatggcaaaaccctgtctctactgaaaatacaaaaaattaactgggcatggtggtacacgcctgtagtcccagctagttgggaggctgaggtgggagaatcaccagagtccaggaggtcaaggctgcagtgatcacaccactgcactccagcctgggtgaagggagcaagaccctgtctcagaaaaaaaagaaaaaagtacatctaacctactaaacatcacagcttaacctttcctacctcaaatacactcagaacacttttgtacagtatttgataaattacatgagatagtcaacaccttcttacaaaataggctttatgtgagatgattcagcctagcatctccaaggggtatcatacagcacatggctagcctggtaaggatcaaaattcaaagtacatttatacggaatgcttttgcaccatcataaagttgacagttgtgcaagtcaaaccatcataagctggggcttccatatgccatctctcaccaccatcttgccactaagagcacggcccaaggatcagcagc

SEQ ID NO: 72 - DNA, 225265 bp, Homo sapiens
  source 1..225265: mol_type = genomic DNA
cttccaacaggtgatttctcagcgagcctgagccagtagtcagggacaaacaggaaggttaaccttgcctctccatgcttgggagaacaggtgtgtgcgcggtggactccggttcagtcgttctttttcttttttcttgcttttgatgggatcagatggttcatttccaaagagagacagagagaactgtatcgtatttaggagcaatagccttggagtaagacttgtgcttaaactctggatttgtttcttatcccctgggtgacctctggcaatttattccacctctctaagcctcagtctttgttacctaaaaaattgggataaagatacgtacctcctatggcatgtcgcggagattaaaggataatgtgcacacccccgagcccagtgccgggcacacggtggctggttgcaacagaaatctgtgggtggaacgctagctagccattgtgatgaataacatcaaggagagggagtggacctacacatggcagtccccttcttccccaaccgctgccaggcagacagccagcgtcctagaacttaaaggacttttcgatggctggaacctgggccgggtgggctccctggcgcggacggaggcggggagcgctggcgggggtctccgtctccagccacgggaaggtccgtgggctcccctgcccgggctgggccggtccccgagcagagagagaggctggtcccccggcccccggcgtcccggggggcaggttctgaggcgggagccagggagagagaggaggggcaaccgggggaatttccccgcctctcttgctggttccataaatcaccgcagccgccgcggcggcccagccgggaagtgcacagagccggagcgcagcgtggtggcaccagacgcctccctttccccaccgcttgctttctttctttcagttgtgtgggtttgtgaagcctcccctttccctcctcgctcgggtggctgccccagtctcgcagcccggccgccgctcctcttccccgggggccgccgtcagtcctcgccgccgcctgctcgctgcgctgggactcgcaggaagcgagagccgcgcggctcggctcgggctccgactccgactccgattccgactgtcagccccggggcccgcgcaccccggcctgcgggcgcccctgctctcggagacgccctctgcgccgcggggcccgtgtgggcgccgggctccggggaccgctcgggcggccgcctcctacccccaccgccgcggagccccgcgatggtggccgcccgcgctcccgcgctgtagccgggcgccccctaagtttgggagccttcgccaccgcggcgcggagcagagcctgcaacagaggaagaaacttttgcggggtgcgccgcgcttttgcggggggcacctcccgcggcccgcttccccgcgcccggagcccgtcggcggggagtggggggaggcagcatggcccgccagccggaggaagaggagacggccgtggcccgggcgcggcggccgcccctctggctgctctgcctggtcgcgtgctggctcctgggcgccggggccgaagccgacttctccatcctggacgaggcgcaagtgctggcgagccagatgcggaggctggcggccgaggagctgggggtcgtcaccatgcaggtaagtggcccccgagctggccagacatcccgcctttctcctttgctcaaactcccatcccactcccggtacaagtcccctggactgtgtgcatcggctccttgcatacatagagcccggcttcccgtcggacccctctgtcctctgcacagaccccctgacaatacaccaactcttcttccatgcattcgtctacccctgcccttctctggagaatcccctgccctctgcacggaacccacttgaccctgcacagcccccctcttctgagtaccagcgccttcatctcgtcaaggattctccagtttcctcgcacgtcttctctaatttgcacacatttcccatgtaggcttgttttcaccctgccacgcctgcaaactccccctttgtgtccccatcccagagcagccagccccgtctggctcggacgattttccgaagtccccaccccacccccttgaccgcgtcctcgcgtcctcgcgtcctccctaccgaggcgcaccaatgggcgccgggagggaaggcgccgcagagtacgcagctgccccggggacacctaggtcccggcggagagcggccctccgagtgggctccgcgctcctttcccctcccgggagcatggggggaggggctggcctggtagattctgggtagactcccgactctaatcctgctgggggactctttttgttgctttccgcatatcctgctgtagtttgcgtgctgtctgctgtatgatttttgtttcgtgtgtgcctttttgggtcgaagaaaaagggagcaaagtgaataaggttcccatttctccagattgtttatcatgtccgtcctcctcgggagaggaaggagggctgacagaaaaactgcccgcagctagtaaggaatcctgatgatgttactcacgaccaacagtagtaaaaattgctgaacaccaaccacctggagattctgccccgctgttattttaatccacttggccataaaggcccactagattaggagaggttgagatgacattcccagcttgaaacctttgctataacattcttagataaaataacaccattctcttacacattctaacaatcatggggatgaatgtggtcttcgaaagattgaagtttccaagaatgcgttcttggaataggtttctgatttccatcctactgtgaccactccttccacctcccaccgggagaggtgtttaagtcacttttgggatttaggtttcttacttctttcttcttcgtcgcgtcgtcctcctcgtcttctccttctcttctttcttccttcttcttcctcctcctcctccttctcgttcttctcctcctctttcttttctttttccttcttccttcctcttctttccacttccccacaccaatctcctcccaagaggttacaattttcttgaggaaagttccacagaccttctctactgtggggaaagaccaccggaattttttaaagggtgacatgaggactgaggagtggatggattttgaaaggtaattttgcatttatttgcagacacccagccctgaagtgcaatggagttgggttttcttgatttgcataataatagataagcttttaagatgcatcattcaactatgccgatctttcaggttcagattcagttgcaattttttccatatgcattttctgatttctgattattgctgagttcttaggagtgaagtgacttttagaaaagatagaaaactaggattaaaaaaacagtggtgaatatttccattcagagcacaattgtatttttgcattgaggcacctcttttaataaaggaaacttaatatattggagttgtggactctgcttgtaggatttgtaggcacttgccaccttcactccatccctagggctggacaagaaatcttaggattcccccctatcccgcccccccacgccttttccttgtaagctaaggacttgctttttctaagatgctgacagccattttactgtttctcacccagtccttgacaaaaggtgaaattggatcccaacacattgtcattcaggtagggatcctaagcaaatgtagttttaaaaggctgccctgttgaaaaagacacttcgaaaaaaagctctgatcggtggggggtttgtgcccaaatggtcctttatctcctcccaactggcctctttctaacacctttgcaacctcattgtggaaacggacctcctgtggacagggttttgtctggcaaaatgtgaagtggcttctctccttttttgaaaggagacacacatactgtatttaaattctgcttcttgagctgtacattgatctgccacttgcttctaactgggaaaattgcagaaagtgtctctttttaatttagttagactggtcggaaaaaaaaaagtcgaatgcaggttagatttttggccttagaacaaagattttgagccccacattctcatctgtaaacctttgggatttgttcagtgggtctgaaattatgtgggtttagttacctaaagtgtaggttatatagccctccctgcagcatgatggattttatagaggtggagctaatctgtttttcagaggtaagcctcacataggctttaaggtgtgacttcctacgaagatggtcagggtgggggtggagagggggatagttgtgtctctttggaaaagaatgtcttcccttgcttaagggattgactcctttcatttgaccttggcattttgagcatagtacaggcctttcaggacaccatctcactttatgagaaacattctataggcctctttatatgtaaaaagccaatgttcagacttttatattgcttctgctgctgaaattctcgaaagacgattttaaagtttgagaaattataaagtagccctcaaaccaggcctgttgttttgcagcatttcaagtggcagcacttactgcttataaggagttgcaagggggtaattttacaaaaacaaaaacctaggcttcttttagcactatagtttcccatgacgtagttttcgcacttgctgatagagaagacagtttgaaaagcgtctaccttgaagattttcttggaaaattctccagtgggggctgcctactcatgatttttgttgttcctttttaataatggacaaaatatattttaaaaaatctttaaataagttgtgccaaccaattttgccagtactctgggaaagctgtcactgaatactgttcccctgacagcagacatcatacatcatggataaaagtcaaaaacctaatcatcatctcctcatgggtctggtgcagaggagccatggtggcattgaggtctgggagcagtaagtggctgtgtccagggagacgggtttttgcctatttattcatgcaacaagtttttatcaagcagcatcgtggagtggaaagagccccacattgggtaggtagagacctggattccagctctgccatttgcaagttgggtgattttatctgtaaaattgaggatggtgattcttcctcaagatttgctctgtggacttaaaggaaatagtgcatgtaaaggcatctgttaatgttaagccagggctgagaaatattgatggatgtggttgttctcaaatggagaaatgattattggaagcttactgagcatggagctctatgctgggtattcaggggattttacaaggacgtattccagcacaactccttaaggagtttacattctcgaggaggagataagattgcacaggtaaaccagctaagtaacaatgcctgcttgttagaaggcatatctggctctgggagccatttcgccaggcacttataaggcccatttaacattataggacagtacaggcttcctaacagcaagggcctggcacaaggccagtgtgcctgccttaaagttagcccaactctgctgggctgggcacacttactatgaacttggcagacagaccagcaggttggtcagacagctgctggatgaggcctgggagggagggaggagcagggtttcttccagtcagggcagaagaaataccagaagcaagaactggagcttcaactccaattgaagaaaaagcagcagctagaacagaggcatgttcaggaactgaaggactcagctggggcagaagtgtcaaagatataaagcaatgttgtaaatactgactacagctggaattaaagagcaacgcttctttgtatgcagtaaaacaacaatgcactaaattccttcctttttttttttttttttttcttaagagacaggatctttgctctgtcacctaggctggagtgcagtgatgtgatcatagttcactgtaacctcaaactcctgggctcaagcagtcctcttgagtagctgagactacacacacataccatcacaccctgctaattttgtaattttttgtagggatggagtctcactctgttggccaggctggtcttgaactcctggcctcaagtgatcctcccaccttggcttcccaaagttctggaattacagatgtgagctactgtgcctgtcctgcattattcattttcgcatatatccaacaaaattttggggagcttctgctctatgaagggtcttgggttagattttatttatttattttttatattttgagatggagtcttgctcagtcacccaggctggagtgcagtggcgtgatctctgctcactgcaacctctgcctaccgggttcacgccattctcctgcctcagcctcctgagtagctgggtctacagacgcctgccacgacacccggctaattttttttgtatttttagtagagacggggtttcaccatgttagccaggatggtctcgatttcctgacctcgtgatccacccgcctcggcctcccaaagtggggttagattaaactggcaatcacaggtgactaaagcctagtccatgcccttaatctgtcaactaatgatggaaatagacacaaaaagaggcattatgatacaggtggttagcgagagacatagaggcattacactgcagtaggttagtgcagtggtagagagagaaacaggatattatgggagcatagaggagccttgcccaagcccctctggtgaagtcaaggaagttagctacttctccattgtccttttcagtgaaatgtccacacacacaggccagtcctgaaggaagcagcagcagcagcagcagcagcagcagcttcacacatgaagggtagccaaatcagtagttcattagatgtttctgattcctttggtggcactggacaaggtagctcgtgtatcttgaacacctgaacaggactctgactcctgtgccccttcatatggctcccatgtctcatttctttggccattatcctagagcttctgtggttattggacataaatatcttgctggctctattataactgcaagctgatttgcagtcatgtttggtaagatgtgtaatttcctctaaatcacatgcatcataacaggacagggctggtttagaatgatttgaatgtgtaattacgcaatatagaatattttcgaaggaaaaatcacctgtatatgcaaataatgtgatttgattctacgccttgtgtaccatataagccttagtggaaaaactgctgtgttgctttcttttgaaaatggatatttagaatagaagaaaactgtccattgacggatgactctgagttgaacttgtcaggaatgagcccaagaaaaagcatgttgaatgacttctgataaactgtctctgttgtgcttagcacttcctggacttccttctcactaatgcctatctttgctggccttattccttgtgcttattatgtttttcctgccaatagtacttgagtctggaagggcttgggggagggagaggagatggttttacacttagtaacatgttgctgctatttctggttgctgcttgaggagttccttccttgagcttaagtggatgagcaggcaggaaccttgcagaactctggaattttggtattagatggagtgggatttattttagatatgcttggaccttggagtaagaatttattgaaagtcaaaatatgaagggacaacagggacaagaattttgactcagccagttagttattaactgtgtaacttctgtcatgttattaaatcactctgaactttagtgtctttgtatttcatgtagctaatgggagtaaatatattttaaaggataaccaagtgtctagctcagggcctaaggtaggagcagtcaataaacagaaatgtaaatatgagagcagttcatttagtgccagggcacagaaccgggaaggtggtaaacatgtagctcctaagcctgaatgaaactgaaatctaatttgtagacctgcagatttcaatatggtcaatcctctgcccccaggtttttaagatatggttcacggacctttggatgtggtgcaaagccatgcttggggctttctgaagaaaatgctagacctggctagtcatagttatttctttagttttaaactacaaagatttaaaaacatatacaaaagtaaataaaatagcatatgaatatccacatacctctcacccagcttagacagttattaattgatggtcaggctggtttcatctctacctctgcctccacttgctcttccccccagattattattattattattattattattattattattattattttattttatttttttttttgagacggagtctcgctctgtcgcccaggccggactgcggactgcagtggcacaatttcggctcactgcaagctctgcttcccgggttcatgccattctcctgcctcagcctcccgagtagctgggactacaggcgcctgccaccgcgcccggctaattttttgtatttttagtagagacggggtttcaccttgttagccaggatggtctcgatctcctgacctcgtgatccacccgcctcggcctcccaaagtgctgggattacaggcgtgagccaccgcgcccggcccccccagattattttgaagcaaattccaaatatcacataatttcatctatgacatgtttattgtatccttatttaatttctatatttgtaatgttttataatatgtataatatattggtacactagtatataaaatttacaattcacaaataaatataaatattttggaggttgtttaggctacattttttaacaatgatgtgcctgaataaaaccattggtgactctcctagatttttacaaattagttaatacctttgcccagcaaattccccagccttccagttgtaatgccaagcttctttggggaagctcctctgggtctgtccctaattgtgctgtctggcccttgatttcatgcctggctttctccacaagactgggagggtccttgtttttcttaaaggctggcatatagtctaggcacacacattggactactgcaatatgaactgcatctactgcttgtccctgttctctcccccttccagaagagacaagagtcagaaaaggactaagcgagatagctgtaactgggagagaagagaggcagattgaagaggaagagctggactaatatataatgtcttctgatcagtctgtcagcaaatattcactggattccttattgcagggaggctgagagtgatacaggacatccagtgcctccccctaagaccccagagctctgtcctatccagagaggctaaaccaacttggatggctcaagacaatatagaaataaacgctaaaatatgggatctagagtacacccagggttgctatatcgaattcatgtttctagaggtcagttcaacacaatgaatgaagtggaccaggtgtaggtaagcagggagtggtgctggatgttgcaagctggaggacatgtgccaagggtgaaggggggcaggaccactcagttactctgttgcccagtagccatgtgggtccaatgttgtcacatgactttgttttttatgagaagctgggtgtctgttttttccataaaatatctttaaatttttggcaactaattcagtttaaaaaaaaaaaaaaagaaaaacacactatgtgggccaaaccaaacatgtctgcaggctggatagggccaaaggccaccaatttgcagtgtctgggttagaattattcagcgggttacaaaaagaaaatgcagtgcttgtgtgcaggttatggggaagccaatttctttgtgatacaaaggagaactttctgatagaagagttctagaatggattgctttgagatatgagcttgtcatcataatgacttcaacacagatgaatgtttacttggtgccaggcactatgttaggtttgagatacctacccatcagttaatttctgatgtaatgaatgttatgagaggaggttcaggatgcttggagaaagtgtcagggatgttaacctatttaagggcacagagggattctggcaggcctccctaagaaagtggaatgaattaggagttggttagtgaaagagtggacctcccagaaggctcctttttgaggaaaagcatagcacctttgatgagtggaaagatggcattatggttttggagtttagagaactagtgggaagaaagggcataaatagaggtgggagaaataggcagaggtcaagctgggggctgtttcttggatccttcatgtcagtaaagacttgttctgcgggcagcagaacactcaactcacactggcaagaaaggaagctaccaccctatgcggttgaagtgtctggggtagatctttgggcaggactggattggggctcaaagcatgtggccagtatgctgtttttctccctttgcttgcctacttcttaaataggttctcccctctatttcaatatggctggcagtagcttatcagtgtttgagttgggaactagctgctgcttgtgcccaagttccttgtatttggaggtggtgtgctctgaggagaagaaacaaaaatctggagaaagcttagaacctagaaaactcagccaaagtgacttcagactcagacacttcagcagtcaccagttgccaaggcctgctacatttctggattctgcctccccaagtccagttggagcctgcaaggtggactccctgcttctgctccaaagacaggctggctgcccagtgtggtccctcctgtggagttgtgcaaatccaggcttatcaggcctgccatttctccctgacctctcagatctacagatcactggctgctatgagaacagggatggaccagagagacagtcaaatctgccctgcttgttttacaaatgttcattttacagaaactgaggcccagcgaggaagtggctctctggagagcacaccagtagtaagtgacagattcagaactcatgttttggttttagactcttgttttttgacccttttcgtgatattatactgtgggggccccttttttttccgcatttttctcttagaatgaaaaagaaaacttgacatagtagtatacattcctcttttgaaaagaaagtttggcttaatgatttaatggctgtaaacttaaagctgatggtctcatttgacagctgactagatttttaagttgttaaatacctagaagtcagtgagccagtgaagaaagttaaaaaattcttagacttactagaatgttgttagattttttttttaagtgcaaaggtaagtggtcaataactatcattgcgaaccagtaccatccaaacaatttttatttttttatttttttttttactgaaaaggtaagttatttaaaaatactttagaggaggaatgactttgttttgtgtttgtttatgtaaaagccacagaagaaaattccacctgtaattttcaggtaaagttctattttgaaattggattttatgacctacatctctctccctagtcattaaggggatatgaagttgtttctttctctctctctccctttttttttttttgggtgaaaattgcagtaggattactactttggaggaatcattcatttaatttgatgatggaacaaactaaatgtcatttaaatgtttctttaccttgccctctttttttctgagttcaaaggtagctttctctacttcagatttgcacagtcaaatgatttcagagttaattacagtttgaaaagttccaacacctaaacaccagagtggggaatgtaaaaagtagcttatggtccatatttctctggatatagtatgctttattgtaattgtagagtggaagccaggggagtaaattcttatcttgtacatgataatgtcttggttctcttccaaccataacagttattataaagatgcagtcaaagcccaagacggcagcatttttttttcttgcttccccttggattttcattttattttatttttgcatggagtatttttaaagatattcaaggccctggtggaaggacggtgaaaattggcaaaccagtgaaaatgaatctgaatttttaattaggctttgagttgtttcttcaaagtgtggacacatcattagggatgtaagtcttgttgcattagcagagactgacattttacttcaaacgcagagagtgcagctgtcctgtgcagataaaagtcgccaagtatggaatagcaaggtggattggtagataattagctgtcccacattactgcagtgtggaagaagcctgccagtcatgggcaggaaggaggaattattagcaggagaaaatccaagtgtgtcataaagcaatttggaatcacttcagctgtggcagagctgataaggcttatgttaaggaaaaacagaaactgagtctagtatatggtggccaacttttcttgctttcttttaaataaaatcttaattcaaaaaacaaattgctggaaattaatgatctataaatatgctgaaatatagattcatcagtctgcttgactctatatataaaaatttaaccagcttacagtagttttatttccatgtcacttgaaaataaggtaaggattctatataggaaaaaatatattacagagaagccgtgaacccatggcaattactgtgctgtatattaccattaaaagatatttgaagaagaaaattggaagtatatcatctctgatataaatgtataatatttataaatggtttcaggatattttcatgtctgtattactggtagcatatgtctgtgtatttaaatattttaagagtttttctgtgatcattgcattcatttctaagggactagaggtgtagaaagacctgttgggtttcttgtccatcctctatcatttgctaactcacatgaaacttcatgggattttttttttccccacttggattactccgtgtgcctctgccagaatactggccttctttgttctaacacaatccgctttaattgattggctctctctaaagcctatatttctcatgacagcccaaagacaggatgtgctgaaatgggttggtttccataactttgcttggtggtgcctgaacaagagttgcccttggccactgcaggagacagccagtgctttttgccgctttttctgctccctttctaggggactgttagtcacagagttgttgctgctgttgttgctgccctgagtggttttgggggaaaacctggagaacatagattgggtttgtttgtttgttttctgttgcagtcttggctatttgatccagaattggcttcactgaaccatttatgaaaaggggaaatttgccacttctgtagtcttcaggggggttagcctgtgtgctaattatgaaccaaacacatttgttaggagtgttttaaacttgagatagtataatttcagatgaccataaaagaggcaaatacattatttgcacatattcagataacaaatgtaggcaagagttacaagcagtaaaacatcctggagattacttattagagcatgagctcttgcaggaaagaacacagacttactcatctgcgtagtcctggtatggttacccctgtctgtgtcacatcatgaggactcaaaaaatgtctagaccacagacattgcccagcagcccttaaatggtagactttgtaactttttagtagttactgttacaaatttagcttttactactgtgtttaatgtgtccatttcattactttagaattaccaggaaatgtctagggtctttatctgctactaaagattaagaatgtttcaggtgagtagaagtatctgctacagtatcaagcacattaggactctaagtagactctaagtattagttggttctaatgtttaatatattcacctagagaaagttgggctacatttaggaatgtaaaacatacaaaaatgattgtgtacttgcaaactatatacttgaagctgctttatcctagaggttagacttcattagttaattcatttcacaaatctttattgaacacagactatgtgccaggtattatgcttggatttgagtttatgttgtcacaaagagacttggttcctactcttatgaaatatgcagcctgctaggggaaatagacattaaacaaataatcttataaatatacattgtaaattttgagtaatgttttgaaggaaacatggggcctttagaaagagtaccaagggcaggctgggctgggtgtggtggctcactttggtaatcccagcactttgggaggccgaggtggcaggaccccttgaggccaggagttcaagaccagtgtaggcaacatggtgagaccctgtctctaccaaaaaaaaaaaaaaaaaaaaaagtgccaaggagatcttttagaaatgcaagtcagatgtcatacctctgcttaaaactccctaaaggttctcatctgactcagtaaaatcctgaattactggtggccttcacagctgtatgtgatctggcccctgccacctttgtgaccttatcttttaccttcccccccccccttgcatataactctgttctttcagcactccaagcacattcctgacccagaacctttgaacttgctgctcctcttgcttgggaacagcaagaagtatccttgccaaccctctttgaaacagcaccgtcccttgcccttcctcattgtttcctaccctgtttcttttagtgttcgtcatgccccctaacctctcacaggtaagcactgtattgttcaatgctatattcctgtagaatggtgcttggcacttagaagtaccccataaatcattattggacaagggttagcgggagcgacaactctaaaagggaatctgaagcagtgatggaaaggaggagccaatcaggggaggggctgggggcctagtagaaggaggaaccaatcaacggagaggttgggaggggacttggcagaaggaggaggagccaaccaggggagcggtttagggggtctagcattccaacagaaggaagaggctttgtagaggtcttgagagacaggaccttggtgtagtttaagaactgaaagaaagccaggcggctgacagcatacaagcagaagggtgatgtgaagggaggaatttgggttcttattcctcttcaattcaggtatatttcccagtagctcttttaggcgtggccaaaagtgtacagttctgtggcattaaatacttttcatattgtcgtgtaaccatcatcaccatccatctctagaactttttcatcttcccaaactctgtaccattgaacaataatgccccattcctccctctcgccagttcctggcaatcactgttctactttctatctctctgaatttggctactctaggtacctcataaaagtggaattaaacaacatttgtccttctgtgactgacttcacttggcataatgtcttcaaggttcatccatgcgtagcatgtgtcagaatttcctttctttctaaggctgaataatattccattgtgtatatgtgccacattttgtttatccattcatccatcaatggacacttggcttgcttccaccttttggctactgtgaataatgctactacaaacatgagtgtacaaatatctgtttgggtctgctttcagttcttttgagcatgtgcccagaaatgaaattgctagatcatatggtaattctgtttgtccgagaaactgccgtactgttttccatagtgggtgtaccattttactttcccaccagcaatgcacaagggttctaatttcttcccctccttaccaatacttgttttttgtttgtttggtttatttgttttacagtagctatcctaatgggagtgaaaatatacactttttgttgaagtttcatgaattttgaaaatgcagtcatgtaaccaacaccacagtcaagatatacaacagtatcatcaccccccaaaattatctgatgctgctcctttatagtcagtcctttccccacctgaaactcctggaaaccatcgatatattctccatatctatagttttgccttttccagaagaggataaatggaaacattatggtgtgcattttgagtctggcatctttcatttaacacagtgcatttgagattcatccatgttgtatgtatcagtagttaattcctatttattgctgagtaccattctgttgtacagatatgccacagtttgcttacccattcactaattaaagaacatttgagtttttgtagttttttgttttgttttgttttgagacagggtcttgctctgtcacccaggctggagtgcagtagcatgatcacagctcactgtagcctccacctcctggactcaagtgatcctcccatctcagcctcttgagtggctgtgaccacagacatgcaccatcatgcctggctaatttttgtattttttgtagagatagggtttcaccatgttgcctaggctgggagttttttgatgtttcaaatctactattaaacattcagggtttaatagtagttttgggttgaatgtaagttttcatatttctaggggtgggattactgtgccatatgttaagtgtatgttaaactttataagaaactgccagtctattttccaaaggggctatattagtttgtattcccaccagcaatgtatgaaagtcctggttgctccacagcctcaccacaacttggtagaatctgtcattttaatataagtcattgtaaaatgtgtgaaatggtatctcattgttgttttagtgaatatttctctaatgaacaatgatgctgagcattttttcatgtgcctatttgccattagtatatcttttttggtgaaatatcaaaacctttgctaattttaaattgggctgtttattatcgatttttaaataatttaatgatttttattaaatttgtagcattatgcaatgagcaccactatctggttttataacatttccataaccaaaaaagttttcacatattcatttattgtcaagttttgagagcgcgcgcacacacacacacacacatacacacacacacacacacacacatacacatacacacacacacatacacacacacacgtattcagatgtgttttttatcttccggatgtggactaagttctgctactacaaattgattttctttcgagtgacattgttctcaaaggaaatttgcttttattatttaaataataatgacatccaggattagaaataataaagtgtaatccagggtgtatagaaatcttcaagagagctgtgagttttgcagttcttgttttcagctaaaaacaaagcattatttaggatttttgggtcaatgtggcctgtgtagaatcttgggtttagttagtcaatctgcaagaaactgtagattgaacttctgttatgcacaagcacagctttgggagctgggagcacactgatggatagaacagagtccctgcctttaaggagcttacattcttataagagggagataaatatttaaacatgtaaatgctaagtacatgtaatgttggaccctgaccagttctgtgaaggacataaagtaggttaacatggagttcaaagaaggcttcttgggggtgctgatatttgagtggaggcatgaatgatgattggtagcagcctaggaggacctggagtaaggaataaagcatacagagacctgtggagggaaggagatcagtgtgtgtgaagggctgaaagaaggcactgaagaaaggtgggaataaaggaagatgagcgaggataggatcactgtggagaacaagtttggattttgttctggctgaaatgggaagccactggagggttttaggcacaagagcaagggagttggcttttgcttagaaggatccctctggctggttccatttttttctcttactctcttggctctgtcaccccctggctgtcagtttatcctcaggctggttttgcctgtagtaaaatgagtacattcagtagaagagggcacctttctccccccaggctttgaaggatgccttgggctcactctgattggaccttagtggaatacaagagaatgggattacattagtttatgccaatcaggacctactcctagagcccaaagctcctagagctgggttgattctactcacattttatgacctacacaatccagtgatttggatagcagagaggtgacaccaatatttactacaattatcactgttaccattccactggcagtagactacagggaatgattttgatcattttggctagtgtcttggttatgctggacctccttttttaaaaaaaaaatgtaactgattatctacttagcacctgccatacctaatttcaagacagacatgaaacaaaggaaatgcatggtggtgttacgtcaaccatagtgccaggaactgcttaattcatttggttagtagaagaattcaaatcaattagtttagaaggcaattctaatactttatgtatttgaatataatttcaactttttgtgaggtgatgtgattgtggtttggaattgtccatgctggtggggtttacattttacaaacatattactacagatacagcttcaaaatataatatgttttatagatagaactgggtttttaagtagctggtggtagatgcttttatgatttatgttttgtaagtttcaattctttgaccaatctctgtttgtccatctctaatttctggttggctgtgtctgttctatgatgatactgagaaaagttacaaagagaattggtacttttggatgtggtttttaaacagcctgcaattgtttcatctaattagtgaaactaaaatacatgatttttataaatgatttttgagaggtttctagttcccaaaaaattaaaatctattcgggacagttatagagaattcattgtacagagaatctcattatgacatagtaaaatattattgaggtgaagtatgaaaacatcctttttgagtttatcttcctcataaaaatttgtcttctatttgatgcaaatcaagattatataggacttgcatgtaacctggtaaatttcttgttgaattttcatttagtgttttttgctcataaattattgaagtgagagtattgtggtactattttccaaaatgtctgacattgaatgaagaggtgggaggtctactaacataacagtatgttcctccattattctttctttcaatacacattgtgcatacagcctgccaagctgtgtgtcttatccagtgaattcaagtatcttccatttcgttagaatttgactttcatacactggttctcttagttacaagactgagatcaaaattgtgtagataaacattgagctattcttacttttatcatcacattagaattctataaatgtctttttcctcaaagcattcacatcactgtagaacacctttaaaacattagaaatgattctcatgttgaaacaatttaaccaggaaaattaaataaataagaaactaaataattatttaacatatatttaaagtctgttactagccaggtactctggtagatacctaggatagaaaagtcaaccaaatacagccctgctttcctggagtgaacattctactgggggattagttagtaagcaagctgggaacagcaggggatgagggtcagctctgggaaatcatgggagattgttcataagcaatggtggagatttttgcttgatggatgcccatgggtcatgttccctggaggattgtgtttcagggattaactctttttaagctagtctgtcccaagctgtatttcttatttatggcatttttagacagcccacgagtggcctgtaaacaattactatgcttcattcttcctctgtgtgttttctataaaccttcaacttggttttttatttccgtcttataactgagctgccagttgccctgagactttttccattttccaatctcccaggaatgcttacctttgtgggctttgtggatgtgattttgaagaaggagtgagtcctccaaactaaaagccatttttaagtagtgcagagaccttccccaaaggaggcgagagatatggatgattccaggaatccccagtttacaaagagtctggatttcaaagctcgtttcagagtctgttgtctggaacaacattcacatagaggggttataaaagcagaccccgctctcaggccaactcacaaaagcctgtttaggagaaatgggattttaatccaagctcttttgctatccttctgaacctcaggtttcttactgtaaaaatcagggctgtttccaccgtcgttgtagagttaaatgagatgaggtttgtaagaatatctagcacaatgcctgatgccagaggtctcaggaagtgtttgctttttcttcatgtgaggatacataatgctaagtcttcagaattttatactctactcctcacttctagatttgagcagccaggaagagtcctgggtgtgtggggatgatagatgaggaggatgaatctcctgttattaaggatgaggaaaaggggaagtgttataatattattagttcctatttattgagcatttactatgcactgcataccatgctaagcacaagttaagtactggctattattacctaacttatacataccccagtggaccaagctggatgacagaatgtccattcctaattgccttagccaaagggagttgtacaaagttacctaattcccttggccagaggtacaaatagctccatctcagcccctgcccactttcaatgtcgcccctgtccaccgatcaggaataactatttggggatatttttgtctgtcactaagcattttcagcaaaaaggaagatatttttcaaattcccaaagggcagaagcagccctctctctggtactgcaggtctgactgggcatggtttcctcttgaaatgtctccttgtgatgttataacttaaaagatggagggctgtttgatccaagcctaggatttgttggctacagggttttcgttaatagaaaacattcatgcacctctaggggggagaaattaaagcacatacttcttcctgtttgaccttcgaacccttgccatttacatcaaacactcactgggagagaaagctaatttaataaactgtgatagcttcttctctaacaagcctcactttaaacttggcattttctcctcaagctgatgagtttctgtcttctcagaagatgtgtgtacccttcagacatctgaggggagagaatgtactttgtgggtggtgcaatgccttgctaatgtcatgttctcccttcagtgagtttcaaaaatagcttgccttttaagaacaattacaaaggagtcgtgcaaaggcagagtgacttggcttcagcaagcctcaatttcttgatctgtaaaatagggattttaccctacctcaaaggttgtagtgaagaccaaaagcaagaatttatataaaagtactttgtatcatgctttttcagttataaccttttattctcagggaagtcagcaaatgctggtgggaacatagatgcagagcaacattttctctctccaaacatggactgaaaactcttgccctttaattttcagaaaaccccccatcctgtggggttctcatgtaaaaattaaaagataaaaatctagaaaaatctttgcttaaataattttgaaaaagtaaataaataattgaacctgtctaaaatcgagagaccagtatgatatgactaatattaataatgtctagaatttgttaccctgcttaaatttggtcaggggttgctctcaaatggtccaaactataaacatgcagtccatgaatgccagggtccctgtatatagtaactaacccaaagcactgggaaaagcagtacctttcttcaaggactgcttcctctctctctctctctttttttttttttaaagaaatgatctccctctgttttactctgttttcacactgctataaataattatctgagactggataatttataaagaaaacaagtttaattgactcacagttctgcatggctggggaggcctcaggaaacttacaatcatggtggaaggcaaaggggaagcaaggcatgccttatacatggtggcaggagagagaaagaagagcaaggggggaagtgccacacttttataccatcagatctcatgagaactcaagaactcactatcacaagaaaagcaggggggaaatccacccccatgattcagtcacctccctccaggaccctcccctgacacatgagaattacaatttgatgtgagacttgggtggggacacagactcaaaccatatcaccctctgttgcccagcttggctcactgcagccttgacctctcatgcataagtgatcctcctgcctcagcctcctgagtagctgggactacaggcatgcaccaccatgtccagctaattaaaaattttgttttttgtagagccagggtcttactgtcttgcccaggctagtctcagactcctggactcaagcagtcctcctacctcagcctcccaaagtactgggattacaagtgtgagccactgcacccagcggttttttttgtttgtttgttttttgttttttttttattaataaaaattaacagtgagacactagctttgctgtgttgaaatcatatactgtacttgatttcctgaaagtacctttcactagttttttttcttgacaaaagatggtttgaaactggaacttccctcagtatttctgtttgaattttaaaagatggaagctttttttaaaaaaagaaatttggaataaaaggtgaagaaaaaaattgttttcatctaggtagcattattcatttgggaaaaagaagacagttgaagaaattattctatacctgcagtttaaacaacttatattttggaaatgttttatccttagcaaaaggctagtggaattctttgttgcttgaagaataacggcacttgtataacttgagaaaaatacggggaaggatggcctttattctgatagcatggagttgggtccccctattgttttcttaaaacaagccgttgaccagcagctctggcctccatgtcccctttggcctttgtctgtgggtacattaatgccattggacaagaccaaatggctcctggcttcagatctctctaggccaatctcacaggatgagtttttctgctcatcacattccttcttggagatatactcctccccgttctgatacttcatcatatgccacacggaaacaataagctccaggtgcccagcagcgctgtgcggttactccgctgatcgttagagttaacgtcagtgtaaaagacagcaccgccactgggactgcctgggcttcctgtccagttatttttgtcttctggcacaaaggtgattatcaggttcattttttcttagcctagtttaatactggtgattcatggaggacatgttgatgtgaaaagaacaggaaatttatccttgaaaattcagctctgacatagccttctctagaaagatgcctgttttcttacacctaagcttgggttgcccttgtgagatacttagcagtagagactacatctgctttccctgaatccctaccttcaatagtgcccaggccaaaactaggccctcagtaagtgctgaaggaatgaatgaatgaatttggaaggaaagacttggggctccacttaatctctctggactttgtaacacgggagttgttaatatctgtgtcacagagctgttgtcacatcaaacgaaatgtctctaaaatccgtttgtgaactgggaaatcatttgcatatcttataaatgtttggaaatgctttttgagtgaaagattttttattttatcttatgtatagctaggtaaataaaaggacattccacttattactatgggtaaacttgctttttgtgtaactttaattcttctccaggaggaggtgatcatgaagaaataatgaggtgaaaagctgaatccttcatgaagccagtgtgatgacccatgaggggcttaataaatatatagtcgagcacttcacttacctattttgagaaaatgcatcacacattttattggaaaattacttgttacattttgtgcttcctatttctaaagatttgggagactgtggaaagtgcatattaccacatagggaactattatgcctctcttcttacaacttagaggaaggaatatttttgcaagagttatggcccatagctggacaatataacaatgcaagtggaggaaaggaattgtgcagataccaaacggctcaacccaggggttgtggcagcctcattggacagttttgtctataccttcttttccccagggaattaccaagaagagtggaggccccctgccactaattttaaatcctccctcctccctgccacacacaccttttctcctccctgcagtggatttacacacattttgtggggctgatttagcgagctcgtggttctcataatctccttatagaagtgtatgcacattaaggggacctatttaatagacacggctgcctctgtgaaagaatgctttgtggaagggagcctttgtgtatttctccatctcagcagttcctggggcgcttcccaagtctctctgtcaccgaatggcagagctgggaaggacctgctccagaataatgggagggagcggtgggacaagggagggaggaggcggccagcgttggaatgtggagaccagggtattggcacttcagagctgagcatcttaacattttctcttcttacccccagctggggactttgcatttgcaatgagggccccacttctctgagccctagtgaaagtggatcactttaagcccacaacaatggtggcttcttatcctcttagttaatgctttagataacttttcttttagaccaggtaggggcttgtaaagtgggactgtggctctggccttgcctggtaagacacatgaaattttctcatcttttctaactatcttccctcccctgttttctcttaatttgaaagaaatctctgcattggtaaatgtggacaaatcaagctgtgttagtgacatatctccagcagttgtcacggacgagatttatttatataggatagcaattctcgagctccccaacaacatcccaaagctttgggatggttctaacgacaaagaatttacatttctctttctttagtctgatttggaagctccaatctagaatttaaccatgtagtagctgcttttatttgctacctgttacctaccagtgaaaccacaaggctagtggaattctttattgcttaaattgacaggatatggttgcttaaattgctaggaaaggggggaaaatctcctaagaaccacgttttattggtaagtagaacttaaaatagtgctcactttttttagtgttttttatgtgccaggcattatgctaagggttagagttctatttctaatgcagatagctactagtttcagaaagagaaatgacttatctaagatgtgaaagccacgaagtggtagatgtggggttgaaacccatgtcagcttctgcttgagcacttaggattattacattaattgattcagcatttagtgagccccataatatttgctgttggcataaatcttgtttctttgtgtagtggtctctttgtgtggggggctctggagaatatgggcatgggttatgagaggaactggtattagttacagttcggtcaacaggaaatactttacagatccagtggttgaaaacacatttgtttagatcattcctctgttccaagtaagcatgtattggaaaccaacctcccctcccctgcttagggagaatggaatgtatgaatatatatagaattaatttgaaaactggaaatgaatgaaaatgcaaagtattattgtcatcattattagaggaagaaaaagagaaaaggaaagaaaacctgaggatagaatgctaaattccagccttaggtaagtttattacagtatacagtgtctatgctatattctggaattcttttctcatgtattaggaaaagctctcctatataatcttaatttatttctttttgaccttctctgttgaaataaatggctaccatctcttcttatgtacttgaaaaactaagttctcccttatcttccaagtgtgaatgaccacacaaaagggtatgtccccaatgtacttggtctgtctgcctggattgaagttggcagataaactttgccctcagttcttgatagggagagagatgaaatgatagataaacatgggcagaaagagagcaatacagtgctttttatttgactccaagctaagagaattactttttttttttttgaccctttttgaacctgagttgctgtaatgagttttcaaagagccctagcaccaaagtcctcaaatttcttcatctaagcctacttttttttcttctttttcttcaagttatggctgtgtctcctgcttttcccatttcttcccaggcgtgtctttcacaaagaaatacaacaaaagttggaatatctaatccattaaaagaaaaaagaacatgtatggacttttctcctttgttggctgggaccttggtagctatattttcgttttattataatatatttgattagctttgaatgtgctgccaaaggcaagagggcacttaatacctttgcattttataatgatttgtttgccaacctggcccatgtcccagacaatgcatcctagaacatgagtggtagtgaaagtgacttgatgtatgtttagtgcttatttgaactacattcaggcctatcctttgaaatttgtggtgtatttcacttctggtagtaggctcaaggttctataaaggatgtcaaattgtgcaaaattgccccacctcagtcttactgaaaatattttgattgctttttagcttattattagtagtagtaatagttgtagtatttaagttcagccaacctagaatatttaagaggagatgtgctggagtgtcaagaaaaatctagtcatctttgaggtaggaaaaattattctacatctggccatatatatgatgaaggcttgagctaataacttagcttctctgtgctagtttcctcctataatctagtaaacaaccttcccagtctaattttctaggattatttgctgactcaaatttttccagtcttgtagccaatggcatcccacttgaggttcttatcctacttgaaacttatagcttacaaacttcacagcctttgggtgaaactagagtgtgttctacctaacatgaaacttaatagtggagacggtgcactgggaattgagaataagaatctgttagagaggtgaagtgagtcaaagtctcttccagctgagccaacctcggaaagctttatttatgggtcaatttatgggtcaatgaagtcacatgacatggactgccttcctacaggacactcgtgcatggaagcccaatttcctcaaaacctagattttccttagaagttgtctcaaaaaaaaaaaaaaaagaaagaaaaagaaaaaagaaagctttgcctaagtggtttcctgtccttaaggtttccatggagagaacattttcaagattaaaggagtctagctgtcatttttaacccgaggggtcttcagatttatgtttcaaagcagggtgggaatttggtccttaaaaaaaaaaaatcatgtttactttttcttcaaaaaaatgccgaggaattagcccattggctactgattattagctttgcagtaaaaaaagagtgagaaagagacatagtctgtaattttatagtgcctccaacactaaaatgaaggcagagcttttttctttctgccaaggatgctacagggctttgatttgcagtggtcatcctttgattatccagtcactcggctaacattttttcagtccctactctgtgcttccatcgtgccttgggaggctttagggtagataaagaaaaggacacaggccttgcatctgcttattgtgcttgtgggctgggggaaataaagacagtccttcctagttttgaaatttcactttcaattaattatagccagcaatggttggcaaggaaagtagggaaagatggaagagccccttaaccagaaagaattaggagatttcaaggcctgttgaaattaatgtgatggttatgagaactgcagctatttggagtcatatagttcaggaaaaaaaataccccagagagagccaggaatcagcaggcattaaaccctggcttgttctcctggtaaatgagtcagcctctggcgggaatataatcaaaataacaacaggacacatcagcatatcaaaaaggggcagagggagtttatcaggggccaagagtgagcacagactagatcccaagccctttgacaggcatttgggcattcctcctttctccagaaaacctttccagagtcttccaacagtggggcaatatacccttaaacaaaactgtggcacgctgggtgtggtggctcatgcctgtaatcccagcactttgggaggccaaggtgggcagaacacctgaggtcaggagttcaagaccagcctggccaacatggtgaaaccctgtctctactgaaaataccaaaaattagctgggcgtggtggtgcgtgcctgtaatcccagctactcaggaggttgagtcaggagaattgcttgaacccaggaggcggaggttgcagtgagctgagatcgtgccactgtactccagtctgggtgacagagcaagactctgttcctaaaacaaaacaaaagagtgtggcatatcctcatggagctaacagacaattaaacaagaggttcaccaaagctcggagagagctaccagagagaaggcataggggactcacaacagcatatagatgctaactcatgcaacttgtaaaatcactcatgtacagtaccaaatacagtgcgtgctccagcatattagaactacttattctctttattttttcactattcgaaactgaaatactgtgttttctaaaacatttagtttaaaactgtatttgattatattccttgtatcatcatatttctgagatttttaaagtttactgcatctttacttttgtgcagggaggcgccttccttatagaaggaatctgaagctcagcgcaatgtggcttcttgcccatgtttgctgaaataactcgtgatggggcctagatgaaaagctcagtttcatgacttttgatccagtggcacttctaccacactacagcatctctcagtatttgaaatgtgaaaaaagattgagtctcaagccccagcttcttggttttcaagtcttgcatgcagagtcttaatttcaaatacttcttgatattctgatctcttgtctctctatcaggactgacatctacaactcagttgtctactctgtctcctattcttgagtaaggtgttgactaccttgctgggctgacttggtggtttcccctgggaaaatgaccagaaagaaagtgcaataatcgtgtgcttaaagtacattggtcatttctctctttgcaacttgcagaatggagaaccatctaaaacagtattaattatttcagccttgctgtagccagtcttcctagatttattaaatagaactgatttcccagttagtttggggtagtatacattcttgaagtagtgctgaccagctgcgaactggacagcattctgatacagcggctccagcatctcgtatcagcaatctccaggtgtcttgatgtttcttgaagtcatgacaagcctctggacacggtgttttaccagcagcattttgtacaactgttggttgtttttcccagactggatgatgtttatcatgttagaggacttgaccagccccttatgggctgattcttatcagttttcttcaccattgcgttaaaggcacctaagcctccataaaattggattctagcaactggaacaatacgcttccttagttcactgcattcatgttcaaaactgtttgccagtacacaaaatcagtgactgaaactcaatggcagaagacaggccagaaaggagtctgccacacactttgcaaaacatgcaaccctagggagctcagtagaacttttgcctgagaagttaagagtatgattgtattaggagatggtgaaactcagagcttcttattctgggctccgcagaattcaaggagtccgtgaacttgatgaggaaaaaaattacaacacaaacctctaactaaaatctatcatttctttccattacattgcagacaacagagcctaacagtattagcagcccatggagaactttatcacagaaacaaatatttcatatataattgtagatttctacagataacttgaaatggcataatcttcagtactttgaaattacagtagttgttagacccatcattagagatgttgttgattaataataaagaagcacatattactatgttacagctttaaaaaattatagtgggtgttctttacaatcttgtgtgttttatgcatttaaacatatgattctgggagattctcatacttcactgccctgtccctgagctgtgtaacacagaagaagctaagaacacctggctgaggataggctgtggtaacaaatgaatccttattatttcagtgattctacacatctttctggtttaatatgtcttctaaggattgatgtggccttcttctatcttgagatgttaccatctcaaactgtgacgttaagatttgcctcaagagggcaagagaggcatggagagctcaccctcattcatgtaggctttggctgggtaatgacacaggttacttctgatcagcccattggccatgactggtcacatgactccacctacctgcaagggagctggagtctatgggagagcacttgagaattccagtaggcagcatacacatacctgtttcacaatggtatgtttttcatttgccagtagtgtttggccttgtgtcttcaacatatgtgcctgttgggaatgaagtttttggtgttgcaaaaaaagaatgcctttttataatcttcgaagaactttcccatttctcacatgcctaataaatatctatgttctaaatagtatccttgattgggcatgcaaacaaaacaaatgaaacccagaatagaactttcataaaatccagtatttaagttcatacacaaattataagaattaacctactgcggccgggctcagtggctcatgtttgtaatcccagcacttgaagaagtcgaggcgggaggatcccttaaagccaagagtttgagaccagtttgagcaacacagcaagacccagaccagcttgggcaacgtagcaagaccttgtctcttaaaaaaaaaaaaaaaaaagagagagagagagagagagagagagagagagtccggacgcggtggctcatgcctgtaatcccagcactttgagaggccaaagcgggtggatcacctgagctcaggagttcgagacctgcttggccaacatggtgaaaccccgtctctactaaaaatacaaaaaattagctgggcgtggtggcaagtgcctataatcccaggtacttgggaggctgaggcaggagaattgcttgaatccatgaggcagaggtcgcagtgagccaggattgcaccattgcactccagctgggtgacagagtgagattctgtctcaaaaaaaaaaaaaaggagagacagagagaaaattaacctattttaacctattgctatgcagatagtaacagtttattataattattatataattaagctacttcttgcaaatgtgaagattctctattccctcctcctgcattttaatacagaagaaattaagaggaaagtgcaatgaacttactaccattatattttctaggaaataagtgaaaagaaaaatagttatagccagaataataaagtggttttgatacactgactatttcttgcctctcttggagttcacaacctctccctctaccagctctatctttattttatgtatcatttctctcgggataaaaccaacttcactcatcatgaccagaggccttccagtcagattggcagctgtattcttggatttattttagtctaggttcccctctttgaactgatttatgcctttttgtgttgatgccttcagcagttaatttcatagtttaactactttttctataagaaaatactatctgaacagtttctagaaattacatcttcttctggcaaaaactgcttctggtgaaattacttctacttctggtgtttttgtgcacaaaaatacccaaccatagtaagtgtaatacaaacaccttgaaatactacctatcagtacctttctctctgcaaggtgtagaaggatggctattccactttcttccaaggctgatgaaaaagaaatggaagtgacttccacttgaaaatcatcagctccatctcactttgaataaaacacagttgatcttttaggggcttacgtgtagatttgagcctggcctagatgcctctttgctggcacctattaaataaacagagtaattaaatgataggtaaaaggtctagaactcaggtgtcattactgaaaagtgttctctttttccccttcactttcttctccatagaaattccccaacagcaagttggatatgatagaagacttagctttactttacataatatttaaggttaattgtttttggatgttttcccagttgttgttgtttttaaaggctaaggaaaagaagcaacagagatttttccttgttttgaatagagaagacatataacaacttaaacaggacagaaaacattgcaagtagatgcctttcccacaatggagctgtgaacttatcctgtaatgtacacttcatagctgtcttatttgagcaaatcctcctgagccctaaaattgatttgttgtattgcttccacattttttgccaacagttatttagacagagctgaacatattaaacactggttgagttccccattgtcctgtctggcactctgtttccatccataatgtacactggtgtacattagatcactgaggggctcattattactgaattccagccacgacttcattcctaaaaaacacatgtgcctgcttggtattgcttgtaagctttaagctctacttttccctctctctgtgtgtgtatgtgtatgtgcatgcatctatgtgtgtgtgtgtgcatgtgtgttgttttcagataataggtacagcataaaatctttttagattataatttttgtttctattgcacattctcttatggtgggggaatttcaggttaaaaaggaaaataccaactctgtctaattaatgtcaaaatttaggtgaagtaggtgaggagaggttgaaaatttgtggtaagtagaagagtatgaataaagttaactgcaattaaaaccacttaacctgtagttacatttcccaaacccaagtggcagccttaaaactgaccactgaattatggaaactgaacggaaaaaggctttgtttcattgcatcgaagtatttttcttttcccattttgggtgcattgatctccctgtattccctggggttgctggaaaaacttggtcaaaaaggataattactttttttatttagttgcatgctcttcaaaaggcaacagcaagtattcattaatttccatctgatagagccgaacttttttttgtggttaaacaattgaaacaggaaatgacccaagatacagtttccatgacaccctgtcacttggatccagttttccagaagatgaaagaccaaagccggcttttgatagtgagtaactaattggactggctgatagtgggagttttttaatgtgaaaaataaaggagaaaaaactggaacagctgtgttttggtacagttgtctaatccccagataaaacactccaaggacattgaaattgaataatgcctttagttaaggggaaaaatctaaaatctgtcaaagcactggtttactttagagaaaatacagaatatatttacatggaaaacccaaaacaaaacaaaacaaaactccaaaaatttacagagccaagatactaagtcatgccttttaggaatcatctttgttcatacaaagtatgatttcatatttttaagatgaattcttacatgtgaataaagagagtacttgctagactactttttcggtcaacattttcaaatgctgtgtagcatggtgggtagacctgaagagttttgttagaaggatgaaaaagttttgtttaactcatgttaaacaatttgaggcatacagttagaagtgtttttactgatgatcccccccatacatacataaatgtaggttccaattgtttatattttgtagagcttctttagagaattaaatgtgaataagccagggatttgttagactaatgggtaaaacttcctgtatactaatggggagatcattgttttgggctctaattctaggccttgctagccatcagcatagtgacctgtgacgctgtttcccttccttttgtaaatgaagaggttggggatagtccttatataatagctcttgtcattctgcctactttggaaatgtaggacaagcactgacctcttctaatataaaggtaatcctggtggacacaatggagatgcacatgaaaaggtgaaaatatttttatttttttgagacagggtctcactctgtcaccaaggctggagtgcagtggtgcaattatggctcactgtaacccccacctcctgggctctagcgatcctcccacctcaggctcccaagtagctaggactactggcgtgtgctaccatgcctggctaatttttgtattttttgcagacatggggttttgccatgttgcccaagatgatctcaaactcctaagctcaaaccatcccacctgccttgtcttcccaaagtgctgggattacaggcatgagccactgcacccagctgctgaaaatgtcttaaaaggagaagacacctattttacttaaatgtgacacaacatttaatcactggaacttaatggtatgcattagaactgtttcttgaggaacacagtctctgacttaatgaattttctagcaagtctcaacctttctcttttgggtgtaccagaattctctcgtcagttttccattagttggatttacctgttgggtttaattctttcattttgtatataggtacctctgcttggtttcattttgctttcctaagcaagggagtagaaacagatgttaagactgaaattctactatatttaggaagaataaataaatatatcttccactatggtataatggaaagatatactgacctgggcatactcatgggcaacgtacctgttgtaaatcccctcctttgcaaattgtacctactttgaggtggactgcaagttctatgaggcctgggacctccctgcaacccttttacaaagccggcagtgtagtgctatctatgcctatctgattgagacactgatcagatgtttgaatggattgtgaagacggtgcgaggatgtacaccaggagcacacagtggctgttcaagaaatggtgatagtttttgtttatattttcatttccatgaattgatattttgatattgataacagcagtctttgagaccaagacttccaaacttttttctggaaataatttttttcttcctcacccagaagaacatttattttctggatgtagttcagatttcttctaaactttatctcacttggtgtgaaactagaggtatagaggtaactttttattataccaccacccaattttaagctccggatgaccgtgcaggaactgcttttgttttcccaaggccaccatccccagtgcagatggaaaggaacaagatacaggagggcagtcaagagcctctggggagcccctgtactggtacctgctcagccccgggagccacaggcattactgtcagggtggctgtctccttattgctcgtcttgcaactgtcactatgctgcgaggtctggaggggaggggaggggaggggacattcctcctgctgcacccttggaggctgcgggctttcctgggcctcggagagcggctcagcgaaggccctcagctcaggagcctgattaggtgcataaaatcgctgtagccagaagggacctccccgcccccgggccgcgccccgccccgccccctcctctggggcacaccccgccccgccgcccctccccctccctgggcacaccctatgccgccgttcctccccctccctgggcgaaccccaacacctccacctcttccccctccctgggcgcaccccatccacgcccgaccatccccctggaccccgccgcccctccccctcttggctgcgccccgccccgccttccgggcgccctccttccccggtctgccttctccctgaccctcctcccggtcgccaggaccccgcggcccgcgaggcagctctttgttccccggcctcgccccgccccgccccgccccgccccgccgggtcccccgcttcgtccccggccgcccgcttgtctctcccctcgctgttctgcccctttgtcttccacgcctgccccttcaactcctcttgccctgcaaaccccgggtcgccacctccacatcccttccacttctacctgcctgccttggcctgcattttattttcaaccaaggttgaaatggtagccccacgcaaaatccgatggtgtgtggaggaactgcccagtcattgcagtctgcacgccttcttaagtgccaggtgcgagcaaggccgaccaggaactgccgatgggcttcacctgtcagactggactgccacctgccacacattcattgaacttttaataagcactgccgctgtgcttggcgttttgctgggctccagaaataaaaaattcagagaggccaaagttcttcagggatgcagacaggtgatagaaccatcatttattgagcacttgctaagtgctaaatactcttacctgcgttatcttgtgtaatcctcacaaccacactcaacgacggcctattgaatgctctctaggtgtctggcagtgttccaaacagtttatgtgtattactttgtttgatcttcccaaccaccaatgaggtaagtactgttattttaatgcagaggaggattatggagggacagagattaaatgactcagagccacatgctcatgacagcagagccaggagtcaaaaccaggcaggttgtagtgggtatactgagagaaaatacgtgttttttttcctagctggaattaagtggatgtgtcaagaaagattcagaggacgtgattcttatgctaagtatctggtgtatcttgtgtcacggttttgttcttgcccgttacttactgtgtttagagaagatgttcaaagagtacctagaaaattgttttaaatacagttaaagctgttcggtattttcacttgcgtttttctgtgtaatacatcaaattgcctgttcttcgttcaagtagctcccccattagagcatgttttttggaacagttaggaacctatagttgtaaagtgattgaaaacctttggtagataggagctgaatttgcttttcagttgtttttgtgactgttgttaggtagggatttcaacttatctgtaaaacgagattaatgataaactctaccatctcttgtgagatgtgaatattttgaggtcccaaggaaaaaggccttggaagttcatgactcgtaaattagtatgtgtttcacacatcatgctttgaaggttgttcttgatgtgttaggataggaccaggagactgactttaggatcacagctacctccccggaacctctcctcatttctcccagctagaaagggttccttttaccctactttcgtgcctctgttgtactccttactggagtcttgccttatagttggttgtatccaatctgcctgccccactatgttatacattccttggggccagggactgccctacccatctttgctttgtccttgagttggaggccacagttgagaccacagcatatgccaattgagttgaactagtgggctgcctggttaatgttgagatgaaaggtgatgttttttacttgtgttgatgttgttgttattttactttctggggtgtaaaaagaacatcttgcataggtagaggtggagcatgggctctaaagcctccagggaagaagcaggggcaggaaaatgggagaactggagtaggaatccgcagacagcccaggagatagagaatgtggaaactcaggttgtattaggaacacgagccaggaagaagtaagaataagttttcaggagctgagagtgagaatggaaattcagctcagacagaaaatagcttctttttgatttgtcaaaaatgttatatttagtggaaaaaatacacctttaggagtcagaagacttgagttcaaaccaccagtatgttgcctgggcaaatcatttaaagttggggcctccatgtcctcatctttaaatcttaaagtagaaaaatgaatgtgtctcatctccttctgtattagtccattctcacactgctgtaaagaaatatctgagactggggaatttataaagaaaagtggtttaattggctcagggtttcataggctgtacagaaaacgtggctgaggaggcctcaggaaacttaaaaccgtggtggaaggtgagggggcaaagcaggcaaatcttcacatggccagagcaggaggacaagagagagaagggggaggtgctacacactttgaaacaaccagattttgtgagaactcagtcattatcatgagaagagcaagggggaaatccacccacatgatccaatcacttcccaccaggcccctccgtcttccaacattggggtttacagttctgcatgagatttgggcagggacacaaatccaaaccatatcaccttcttgatgtgtttttataggaattacatgagaatgcctggagaggtattcttgtattaagtgtaacgcactacacaaatgctggtgtgaaggtgggtgagagcttctggtggaagaaatagcactggatttagcaggggctatgagagcatatgatcttttttgtgtgtgtgaccttggattagcaaatttatctgtctaaacctcaatttccgcatgcgtaaaatggggataatcatgcctaccttaaatgaaatggacctgccaggcaaagcacatatgagttgggtctgtcctggaaaacttgtttcagtgattgacattaaacacctgctgcccttatttagatatattcctctcaagtccctaagttgttctctcactaagcctgagagtgagagggctaagtaagatagagacgtagtgcatttagagaaccatactcagtcttctgttaagacactaccaggtctgacactggcttactgccgcaggctgtttattactcttaagcccaagacaacttctgcagtctggataagttgcctccctagttcatctttttatccttgaaaaaggcccagggctcccaggcattttcttttctttggtgtctcctgccattccccacccccagggttcttctctttctatgattggctgctactcccctcatctttgctgcccagatggcaagcacaaaggaaaaaggtctttttttccttttaaggcttttattgctaattataagagaaaaagcaatagggccacaggactgaaaatttaatgaagttcatactctctttttttctctgttagcttgttcctaactatgagtatggatgaaaaatgctctctgcttttatttgtgagggttggggctgctcatctctttgaactgtcattagcaaaaggctctataactccctctaccttggcatctttcatgcctgtgttacccgccccttgtagcaagtgtggagttttcattttttagagatctccagacttgttaataacaagttcactgggcctcagctctgcccaggagggactaattgcaaagtaaatcccaggccataataaggaattgatgaaagagcaccatctttaatcctttctttggcttcagccacttgttattaaaaaggtgtatttgaatcaactaaagatgaacagctttagttcatttgtctttcttggcttaaaaaaatggtaggaaggaaaaggatctcagggtaaaacactcaagttattcagtaattttataagtctttatttttctttgaccatgaaatcagccctagggtgctttttaaagtagggaagttttgttaaatctccaaggatagaaggaaaacactacaacattatatataaatgcaaaattaagactgtgaagtagattttatgatattttttcaaaacctaatctagatacctattttaatattgtgacatttgcatcccttctcagtttattaacaataggagagatttatttaagacatagcagagacaatgattctcaaacgaatactcctagatgtattttgtcttgcacgattactgttaagatttttcagtttaggatttggaagaaataatacctttcagaaaaacatattttttaaatgctgaaaaactggcaacccagatagaacatgccccacatacatacatttcacatttatgatagaatagtgaagagatattacaacattcatataaaacctacatttaggatgacttagagtgctagttaaaactgctttttaaggaaaattttaatgggagtcaagagccaggagcctcaggtgaattctcagtgctggtacgtgaccagctgcgtgaacctgagcaaatcagtatcttctcttgtcacaaaaaagggatgcggaggtaaagtagagttgctccaacagcattaagatgaagattcagtgaagttttggacatttattgctgtttcagctgacttgcatctttgcaccctttcagctctaggagccaatgggagctacaggggaaggcaagtgatcctctctcctgccgtggcagctggggcagtatgtgtgttacatacactaggccattaaggactgttacctgggactttgagcattaggcagcaatagaaatgggacagtcaataattttaaggttatggagaaaaaaagagggtccagtgacgacggaacagccaggtattcacagtcgcctttcagcaaggttgtttaggtagcttaatctcctgggcaatgttctcaactacctaaccactaagtttctgcctcttgttgtgtttctagtgtctttctaataactctttcttttttctgattaagttcatttctgtcttttattttgttgttctggtggtcattattcagttttgcacaatttttaaattgccaaaaccagaaattgccagagagattgggtcactgggacaaagattcagatacatgcagacaatgccaagtgctcctgtaaatctcttgcaagattgtggtatgatttaaataagatgttgcatattggagtgctgtgggtccttgaaagttcaatgcatgtataattgttattcctggaggttgtaatgaggggaatatctatgggattaatatggctgtgggtacattggaatttagagtgtcaaaggccactggatttggtaatggttctggtccttgtagtggagaatccattttccttttgctgatatctatgtggcaggtaaaacgccttttagatcatagatattttggactgtgcttatttttagtgtacctaagatctctacaggtataggacattaaagcagatggagtacggtatgtagtaggtttgcaaatgaaggagactaatcgtacttctgctgtagagcaggcactgtactttaatctgtttttttccttatttgatgttacttcctcttattttatagatgaggaaatcctcacgagaggaagtcttagtaccttgtcaagtatcaattaactgttataagggtgattgaacattcacatccagggcttttatatttcaaatccctggttctttccattatagcatgctaggatcatgagaaaataaagaagtggaagaaagaccagagaaaggagtaggaattgcctaggaaaataaacaaccatcaggttccagagagaggttattagaaatctagagttcagacaaagaatcataaaattgcaagattagaatggaccttagagaagtagagctcaccaccctctccagctcatctctctctccaacatctccaagtggtcacccagccgcttcccgctacaatgatggggagtgtcttactgcagaagacaatctgttccatctgtatttagctctggccacgaggaaattattccctatgaaccccaggatttcctttggctccaagtttacaaagcaataattagcactttgagttgggaaagctagacagcaaagtggttatgaaccccagctctagaatacaattgccttcctttgaactacagttgccttcctttgaacttgaaatgggctttctcagcttatcagctgtgtccttttctcatctgaacatggtggccatctcacagtgttgatttgagagtcagatgagataaagcatttggcatagtcactggcatgtatagtaagactttttaataaggttttatatataaagttactgattgttattattttccataactctatgaggtagaaattattattcacactttctagatcttagaaactgaggcacctgcctgatggtcacagaaaaagcaagcagggctgggcatggtggctcaagcccgtaatcccagcactttggaaggccaaggcgggtggatcacctgaggtcaggagtttgatactagcctagccaacatggtgaaaccctgtctctacaaaaaatagaaaaattagctggtcatggtggtgcacacctgtaattccagctacttgggaggctgagtcacaagaatggcttgaacccaggaggcagaggttgcagtgagctgagattgcaccactgcactccagcctcggtgacacagtgagactgtgtctcaaaaaaaaaaaaaaaaaaaaaaaaaagcagaagccctctggagttcaagggcaaatgattcaacttctgctcttccccttttaacacttcctgctgttcctcctttactttgaatggagagaggctactgcaggccaactggagtaactaagacaaaataacagtctgcaggtgtggctagggacagacacacacacccctgccaatttcgggctaaattcaacatttccactcttcaagttgctgtaccttcctcttttctttctcctaaagaggaattttcatttgaaactgttatttcagtcatttgtattctctgctcatcagcacatggattagttgtaacttcatgtagttgttttgaatagctgatacaaaaaatcttttggcggggtagaacttggtttttcagtatatgcatgtaagtttgatatgtggttaagttttttctgccaccatttaagtgacttctggactctttcattatcaggtaagatatactttatattagtggatgttaatctctgacctctggatattttcacacaagttcatgccaaacagaggcacaaatttccatccttgttctgtttttccattctccatttctattgtcacattctgacagcctgccaccagagtccaaatctttattctgttgcaagctgggttaccttgagtaaaccacattaatttctagcccaagattatccatctgcaaatttacagcaatatttctgtgttcatctgggtcattctaagtcaggttttcccaaccttaacacaaatgacatgtgacgatggcaggggagggggctgtcctgtgcattttaggatgtttaacaacctctctggcctctacccattagacaccagcagtaacttcctccaagctgtgacaatcaaaaatgtcaagtgtcccctggggggctaaatcttccccaattgagaaatactgttctaaggtgaaacactgttttatgttgaaaggctgctgtaagccatagagctataagataactactagatattttattaaatatctgctttatgtaaagcactgtgcgaatgccatggagaaaaggaggaagtaatcatgtataagggcatccttgcttcccagcagctatggtgggtggaagtgatacaggtagaatttgataaatctgtaagattcaggagatatttcaaacacaaggcatttgacatttgagttgcatcttgccaggaatggtagccatgaaaaggactcaaaggaaagagtgcttactttctagttttttaatgggctggcagtcagaaaatggaaatgagtaaagtaggccttgaatgcctgtgacacagctggagatggtaggagccacctaaaagaaacagttgctgttcaatggaagccacttgttggcagcaggaatgttagtctggggatgccagatctgctagtttttctaaagatgttggaaatccagatttttataagatgtaaaatttcctgaattttaaacattagctcaatttaaaacaacaacatgtgtgagtcaaacaaaacacctatgcaggttaaattaggttgccagtttgcggtttctgttccagataatctttttaggagggacacttctctcatcctgtctcttaaaaaacaattggaggaaaagttaaattggtatgttccttcatactttatacaattcatttccatccgtgttttactttctctgtttgaaccttagctatcaagataaagtttagatctgaagtgttgctctaagtaaaataacgttttggaaactgtgaacatcccccagttaagaattctccagggtcttcagctaaaagtgaaacctggaatgattgccagtgaatgctttttgtggccttggaaattcagagtgatttatcacttgttggtaataactggaggcctctatatacaagaagggagttaaagaggccaaaaataacaagtctaaccatatggctcttttcaagaggtgtccatatggctatctagttaaaaaggactcttgccagcttgactgtgagttttcttttttgtagctcgatataaaagtcttctagctttaacattgtaacaaaggaattcctaggtttcacttctaggttttgaaaaactgaactgggcagtgggggaggaatgcagttgtaggcagctgagctagatgcatagttgaccataggatcattggtatttaccacagcagcaaagctatgtgataactcctatttatattctttttagtctccagcagtagtttagctttttatgatggtgtcaaagttccaagtctgacagtctaactcagtgtgccttcttgttctcaagaatggaacatgcagtactttgtcaaatgccttggtgaaaataagatatgtattaattcttataatttctacctgtatattaaattaagtggcataatttggcctgatttgttcttacagaatccaaatttgtttttagtaattacaattaaataacctattctataatatgctgagaaagaagcaaagttgactggttcctaggttccggagctcatatttgcccccttggtcataatggagacatcttgactatgtgtaatctctaaatctcttcattggtatgctgccatccatgtgattttggtcatactgcatacagtattggattatttaggaggaaaatacagagaaataaatgtatatgcttatggcatagaaaagtgaaaattttggatctagattaatccaaatggtattaattcttagattttccttccagcaaatcccgaatccccattaatactaactatttaacaatttctactaattttaattgaaccagatacttacaaaaaataattgctttggagtgtcctttggaaaacacaattggggagctatggaagttatgttcaggttatgacaaaaacagacaagaaataatacaaaccctactactttgtgcaagagactgaatttaaattaccctaagagcctcctcaactcagatgtttccagtatgattggtgtgacatttgttcaggttctttagaatataagcatatgcaattaataatgaaaatgaattcctatccttgcaaattcaaagtatctcaaagcattttttcccttcttaaatcattttgactattagtatttgtgttgatatggcttcctcacatgagaaatgctattatgcaacagctgtagttgtgctgcctgaatgcatgccagttctgttcagattgagccacagggactgcttgttagctccctagctgcctgggagagagggtaatgtaaaattaatgtatgaagaaaggcctgttatctgacactatttggggatgcaggtggtctgaagtggtgtgcagaaattaaactaacatgctaatctttctacgattatagaaaggtggctgggattcatggtttcaactcttggtattaattttaaaaattgggaagggcattgacttgactccttcttttgcctagctctacttcctaaacttgaagcatgtataaaacttgagattatcagatactttcattttttggaattcagggcatgtttcatagtttggaaaggaagtggtagaagagattgttaataggattttcatatataggttgcaaatatctgaaaaaaatatttgtatattcaagtagtctttttcttgataagtagcacataaactagaccaacatgcaacattttcaaattagttttaagttaaggacaaagtaacatgggttcttcttcagcaatgcagtcctaattctaaatatacctgtccgtttaacattttcttttttctcctggtgattctgcaatcaattatcgctatctctccattctcattttagccaaagcaagcaatttcagcatttaatgttagcattgcatcctatgatgttcagtacataacttgcagtagcatttctcatgtggttctagaacagctgttttgctgatctgcctcatctctagacttggaacctgtcgtactgcctaacagaccagcttacggtgttcataaacaaaacacccggcataatgcctggcacacgctaggtacttagtaaatgtttactcatttatgagattctgtcagtgaggctgtcacgttggaaaaaaggaatgaccaaatgatgagccagactcgattatgcattttcatgaatattatctcatttaatccttaaaacagtcttgcacgataggcatcattatctcttggtttagcttattactcacacattgacctcagagctggttagggggaagagtctgaatctgaacccaggtttttatcttcttattattgttctttctactataccataaagcatattctataatatagaaacatttctagggaaatttttttctggagacttgtctctgaatttgctggagcaattctttcttgtattttaaactgttcctcctagtaaacaaaattgcaaaacttgtctagcagagctggagtgggaaattcagcattgcaattaactggagtcagacagacttgggttttcattctgacttctccacttactagcaatgtgatcttgtgcaagtcatttaagcctcagttttgtcatgtaaattggggatgctgttagtacctatttcatgggcttgtgatgacatgaagcggggaaagcacttgttatatgtgtgagacatagtaggtactgaatgctagctgctgttattgttagtgaataagtgacatctcgtttattcaacaaatattattcattacatttgatcctagccaaaaggccaagaagtgatctgcaaatattttttcagtgtatactatgtgcttttagttctactaattcatcagtgatcaaaacagacaaaaatccatttctgcatggaggttacattccaattgcattccattggggagagctagacaatagacatcatgaatactgggaaataaatgatatcatatgttggagaatggctagtactattcaataaaaaagaaataaaggagaattaagtgagtgtgggacaggggagagttggcagggagctgtggggttgcaatgaaataaagtagtcactggaggcctcattgagaaaatgataattgagcaagaactcaaggggagacaaaggagtatgccatgtggattctctgggcagagcttggcccagtgggatgaagagcaaggaggctgatggggcaggaagacagtaagagcatcactagggctttaaaggccattgtaagggtaaggggaacctgtggggaatcttgagctgaggaatgacgtgattgactttagattaaaattgtgatcattatcaccatgagcttctcctcaggaggagggacctggacagtgtagcacctttacccgattactcttctttctcctattagcttaaccttttacacttgaaaagtatattccaccaccccagggtagctgccctgcctactctatgtcattgattgaacttggcagtcctgtggctgtaatggttgtattccttgggaaacaaaggaaatgattagatcttaagagggaaagaaagtagaatcctgtggtagcacagcttgtgatcctctttgaacatgacttgatctcttccaggcttcccttactgaaccaggaaacctttgtagaggatcctgggaggtgttggtttggtttagtgttttctaaatgtttgtatctccttacggtgagagggatccattatggagcagggggaagagcttaagtgtagtaatttgtcagctcatgacctgtgcttaacttctttcctctaagataatagcagcggacatactctcagcacacatggggatggaaaacatttctgtgctacttctccagtgaaaatcaatgacttttttttttttcactttaagttccgggatacatgtgcagaatgtacaggttcattacataggtatacatgtgccatggtggtttgctgcacctatcaacccatcatctagattttaagccctggctttcaacattcaagatggtcttccattatctcatttatgtcctattattctcaatcaagttaattggaaatctgtttttttagtgcatgtacaggaatatggcaatatcagggaatggtagagaaaatggaagcaggtctaagatgcaaaatttaacacagaatcacatggattggtggagtcagaggatcaaggtccatgcccagctctgtcaaagtagttgtgtgattgtgccatgtctaagctggagtttctttgtgcctcatgggataggaagaaagtaaggtatatagatggctagttttgtgactccaaatgatgggaatcacttttctggtgaagttattgcttgagaagggaaagaggatgggacagtccttgtttagccttttctggataacatcagcatgcctagtgtgggtattttcctgctgccttattccctgggagttggagcctttgtctttctgtcaggctatttacaacctattgtgttctagaaccccatagataagggcttagtgactccttagcttgtgccttccaaccttagtggttctatcaatatctttgtgtccctcacaataccttgaatttcccttcctcattatgttaattatttgaggtaattttagagataggtaccatttaactgagtgaaagctttacaattgaggggttactcattagcaggacctgggttttgtttttaatctcattaaccccttgttacccatttgataacaaagacttcaaggaagaatttgctcaaaaatctctgggagacagtaatagcttcttgggcctgactgataaactttttgcctccagcaatggaaatgtgggaaaattccagatgctaaatgatctggcttggacccagcaggttgaggtagtggagcctttcgattgaggcacagcccaggactgctgcaagggagaggcacaacagataccataaggaggtctgatttctgaaaggagtaccatagaaaaattattgatctgtcccaggcctcagtttccttgtctctaaagtgaaaagattgactgacttagtaatagggaactgattttattctaataatgtaaaaaatacctaccaaactatctggtaagtctgaattaacttttttccttccagcaaaaaaaataaaaagaaaagcattaccagtgactgcccattaactatcaatcagatcctctgagcagttctagttcaccagagttaaccagagttactaagctggtgtaattcctggctcaagccaaaaaacttgatgttttagttagtcttatgacgagcacattttgagtttttttcttttaaaaaataaaatattgcaaacagctctcggtcattaccacctgttgtaagctgatctaagccagttcggttatacacaactcctaggtgcttttttctggtgaattttgatagctgccagattatttgaggtgagaggttttgctactatcccacaaccttgccacctacttatagctagtgcaagtctgagacattctgctgcacatacagacgttgattaacagccgtatatcagccagtaggcacaaaatatttctgcaacattactctctatgcttgataaagtcccagctgtcttcttttagttgttctgctcaccactttgcatgaaagctgtacttgtagacattacaacattccagaggagagttctgttatctttaatagtcagcatcaagcaactggaagtcctccaactgtgccggactcatgtccacttaggggacaagcctatcaaggctacactcttattcatacaagggtagaggtatttctagaatattttggccaattctcataatttgaatatatgtttaagtttaccagggatggcccatttctcacatttatattgctagcaaagaagccattcgtctcacacacccacacaaatccacctctgacattcactttgctaattggcaaagggcctggtgttaatgaacatggatggtggaaatatttgcagtgtgtctttctggagtatgggcttcatgcttagaacacgacctgcctacccctagagtgcattcctgaatataatgccaaccacatttgagttgtagtttaaactaattaactcacatgcaatatctcattacctatactgaattattgttaagttaattaggcatcctaacattgcctttggaaccccactgtggaaaccactgttactaatgtcacgctgtaggagtagactttgaaatgatttgtaaggattcttttgcttaaaaagcactgattaacttccacatactcggaaccatgtcttgtcactgggtgggaaaacatattagttaccatttactgagcacgtagcatgtgtgcagtcctttctgtacattgtctctactccccctctaatcaactgtgtgaaatagagacttggctccatttcatagatgagaaaactgagacatgcagtgggaatctttatctaaacctaggtttatctctacaggtaggtttatctctgcaggtaaggctttcctattagtcctattgctgcataacaacttaccacaaactcagtggcttaaaacaccacaaatttattctatcccagtttctttagggtagaactctgggctaggttctctgctcagggtctcactggactgaaatcaagatggcagctggtacttcagttcccttgtgggcttggagtcttcttccaggctcactggttgtagataagattcatgtccttgctgtcgtagggcagaggtctcagtttccctcctagctgtcatctgggggttgcactaagctcatggaggctattttgtgtcttgccctgtggctaccatagacggctcacaacatgtgtggtgtttgcttgtgggccagctagagtatgtctttgatcccctctggccctggccaaagaaaactctgcttttaaaaggttcatgtaattagtttaggcccattggataatctctgaattatctgaattaactttctgaaagttgctgtgccatgtaacatatataatatgtggtcttttgtgactgacttctttcacttagtttaatatcttcaagctttttacaggctgtgacacatatcattacttgattcttattcatgacaatactattctattgtatagatatactgtattttgtttattcttcagctaatggacattggattgtttccaccttttggctattatgaataatgctgctgtaagtgtttgtgtagaagttttgatatagatatacattttcatttctcttgggtatatgtttttgagtggtattgctggttcatatggtaacagtttaatcatttgtgtatcttccctggaaaaatgtctattcagattctttgcctatttttaaattatctttttattgagttgtaaagatgctttatatagtctagatacaagtctcatcagatatatgatttgcaaatattttctcccattctatgggtcatctttttaatttcttgatggcatcctttgatgcacaaaagtttttaatttcgacaaagtttatttttcctttgtttctcatgttatttgtgccatgtttaagaatcattggccaaatccaaggccatgaagattgtccctgtgatttcttctaaaacttttatagatttagttcttacattgagatatttgatccattttgagttaatttttacatatgttgtaagggtccaactttattcttttacatgtggatatccaattgtcccagcactatcttttgagaagactcttctttccccactgaatggttttggcacccttcaagaccatagatggccatagatgtatgggttgaaacaagttcttttcttttcctctcaacccccacattttttttttgtttttttgagatgaagctcgctgtgtctcccagactagagtgcagtggcatgatctcggctcactgcaacctctgcctcctgggttcaagcaattctcctgcctcagcctcccgagtagctgggattacaggcacatgcaaccacgaccggctaaattttgtatttttagtagagatgggattttaccatgttagccaggcttcaactcctgacctcaagtgatccgcctgcccgcttcagcctcccaaagtgttgggattacaggcatgagccctggtcggagcaagttcctaaagttctgttatgtaagatgttatcaatgggggaaggtggttgaaggatacagggaaactcactttattatttttgcaacttgtaagtctgaaattttttcaaaagaaacttaaaaaaaaagtccttgaggcataggcaaaatttagtagatttggattcatttaatagtttcctcctaatcatgaatttaggaaaatcctaatgatgaaaatcccagtgagaaaaatggcttcctgtattttattctggtgtggtatcccttccaggtgaaagaacattgcatcttggctgcaagagaaagaaaagatcctcagtaatgtttggaatgatttgagtccagggaagtagaccatactgtgtcataagtgctggcacagttttaaaacaaaagcataagtagccatgatggccttcccttctgtttactgctgcctccatcttccccagtagagcagaatttgaacctgactgggtatttggtgaaattctggaattgctattagtgtgacaatggtattgttacttttattttacaaagagtccttatctttcagagttttatgcagactaattgtagatgacacaatatggtatctttcattttattcagaaataatctaggttggggaaagtgagcatatagatgaacaagattgactatgagttggaaattactgaaactaggtaatgggtatgtgggggtttattatactgttttgtcttcttttataggttttccatagttaaaaaataagttttctagggggttgtttttaatatagcattgaggcatttgagtggcatctccatttggagctggctttgctttacataaaagtgagtctttctgagtttggatgcttgtgctatctaggtctggaggagcattttgacagacctgtgaacaaacagttcctggaacaaacacttttaggaggctggatccatctgaggcttgctagagccctgacagaataaacctgtggctcacagtgccgtttttccttcatgtgttattgatgttaatcagccatgcccttggttgcagggttatgtgagtctttttctgaagctttttaagcctgtgattctgtaaatctttgtactttttaaaatgtaagttgacatataaaatgtataaagctgataactagaaaaagtcagaaatagtctgtggagaatctgctcacttggggtcgaacgatattcttttccaatgattgtgctgtttgtagaagagactttcacatgctttattctttcttgcttcctttttctaatggctatggacctcagtaaatggagtagatgagtctttatttatccaagaacaagattcttgcatagaattgttatagctctgtattcaggtgactaaagctttcagaacaatgttaaattgaaaaatctgtacaaaaaaaaaagagacaccatctggaaattattctatgctttattcttggttctactagtaatgaaacgtgagcattccaacttcccgtaatggttaaactttgtgatgtaaatggtgccaggctctgaataggcttgtaaaggttttgctgactcttttgtttttgtttttatgtgctttcaatgaaactatttgtgctgctttagataaaaggaggagcagctttgagtacctctggattattttaatattttaaataatgacaagcaagtatgtgaatgaatattgattactgtatgaataatttgtatataggacaatttttcatctttttccagaagtgagcccattgtagtgtgttggctccatgtctgcttttgtgaaacacagttcaggatcaaatagcaccacttactgggtttttaactcttgactgtgtgacattacccacattagtggcctgttctgtgcctcagttttcctaaccagggatataggaataatgtaatatgtagcacttaactgtataaaaatactttcaggtacactatatttgcctatctacctcactgaatttgcgagggtaatgacaaaagtatttcattaccaaaatccaaagagaagttctagaaaaggatggttccagagatgactttttgattgcaagaataattgagtggcagaattagaaaaagcaaatgtatccttgaaatgtttttaagttacaaaaataactctggaagcaaagacacatgatgatgatgatgaagatgatgatagctttagtgtgctcactatatttctggccctttccttactgctttccgaatattgctttttttcctcccttaatatagcactcccatgtatgagagactcatttccattttcagatgaggaaactgagtaagagtggccaagtcactagcccaaggttgcattgctagtgagtagagagccgagctttgaacttggtgtgtttgaagagccttaactatttctttgtacctccatatccagtacttccataataccaccagtggaccatctctgtgaatattttcccactcatttctctttgcttctaatatttattagcatattaaaatattataatattgtttgtattctgctttatattataattcttctgaagctcctagaaatctggacaagaaaagtttggtattaggtatcttgccaagaatgacattgagaaattagtactcaagatcagagacaggaaataaaaatgtgatcctccaagggtttaaaatgacagaagttgcaaaagaatttctcaatgattaatacatactcaaaaaatgtcaacttgatatttacccgatttgaaaaataacctatcagacattcttttcctccccggtaagatgagcagttcatattagatgctctgaaaaatcttatccagttttgacatgctggttctcaaggcagcccacttcttatcctggcttctttcctcccacactgtattactgatgatcaaatacagtaacctgcagtacttacatctttagaattatttctcatgttcagttttagatgtaggtcagacattaaggggactgggtggcatttcagtattttcgtaaatataaaggtcatctccacctaattgattccacaggtgcaatggccttaactggttagatttctctatagacacttcaggtaagggcaacattttctttaggtaatggcaacattgcattcttcagcctgcctatgaaggattgctaactttattgctctcccagaaaactgtaggtgaggaagaacacactgcctacacaattttcatgtggttatgaaattcttaggaatgtaagcaacaatttttctgtttttgttctgggtgtgtgcttactttaaaaattattattgcttttaaatggacagatgatccaggacctggaaagaattgaatccatattaagtgctactattagggccaaataaaaatctatgccagcattgctttatttgatttgtgaaccgtgtcagcttcctgggatttagggtcagatgatggtgagtttgagctcaaccccttttggacaagccacagcccctcagagcccgtgtgttggttggtaaagtaggtgtaattgcaatggtgtccacctatcaaatatgactgtgtaagctgtcttttttaaaggttttctatgagatatggattcctgagccacagttaaggtgcaagcaagattctaagttatggatggtttctcttctctgtggccctttctttttcattcatcttttaacagtgaaaactgtctaaaaaatgattcatgtctacccaaatctgtggggccattaggactgcaagtgcctttttttttaaagccatttgagaaagagacaaacaaaaatgggtaataagaataacaacgttattcccggaagaaaaggttccagcctgctatgacttgttttggaatctgtgaaaagtcctgagagggctgattgctccataacagggtttcttttagactctcaggtttaaaaagacttgaggaggggggtgaggagagcatgtcagggaaagaagcaattaagttaaaatttcaaaattgatgaaatgaagcaatttcccattcctgctaacgcagaaaactctgcagatttatttatttttttccctgtaagtcagaaacctgtacttttccttctaggcgtctggcgccctgccgtatgagagtctcagctcttgctggggtcatttcttccatcttcctttccttctttcctcttctccacccacctctggtttggtttttgtcactgagtggtagagtataggcctcaatttattactgcgattctttcgcaaaaccatttattcctctagggaaaggaaaaccatgtgagccatctagccagagggtcatgaaagatttccttggtgtaatggttccagacgcttagtatacgtttgatctgtagcgagcagttcggagtcagtagatcctacctgatttcttctcttgagtagagagagaatatagggagttaaagacagcattgctttttaagggcatctggtaaaattgtccagaaaaataacttgattcttactatggcgtaaaatggatgagtgcaagtgcaggaccacggagcggcacagggacagttgcagatccccttgctttcaagaaatggggtgctgattgccttgaagctgggatccatcaaggacaccccagatcattcagtgcggcccatgtgacttcttgctggcatttctaaagagtgctgtttacatttcagtcctgaaacattgtgaagccaccacattctctttgatgtgagctctcacagcacatctgtatttcatcctcccaaccttaggtgagacagtaggcgtttcttcggggagtcttgtgatatgtattttgtgcggtaacagtgtggacacgctctcacgcggtcctgttgtgaaatcattttgtgtgatggcatttgctgcgtttttagggtctggaggaagtgaattttgacctgaggcaggctggtgtctcacaaattcctgaaaattttatattcttccttttgtttataacttcatctgttttcctaacgattatagtttaaaaccaatttcctttctctctgtttaaaagtaaagcagatattactaacatggataatattgcacttaatatacaaatctataaaaagattatattttattttttgtagtaggggtcagcaagtactgatgttgatctgattgccagtactgtgatcttagagtacttgctttgtacaaaaatcaaaatgtgttttctaaggcctcttgtaaattagggtccaacagtgagtatgtttctcagttgtcattttgtgttgctaactggcccagtgcttgtggaatctcactgtttctgctgctgctaatgttgacttctcacatccattcttcatgttaatgtatgttgcacaatgcagaataaattctggaaaggagtggggggatgagtttctgaaagattatctccatttataatgtgagcagcactacttgagaattttaccattcttaataagcctggtatttagaatcaaatctcttgcatggtctaattatggagatggatattattatctcaacatcctcatatgagttaagtttgaagacctttttctttactgtttctgaaaggaggtccagctaatttactgcaaatgaaataagaagtattttggaggaataggttgacatttagcattctggtttgaaaaccctctgactgttaaatatttaatgtgctgcaaagcatccttaaaaattaaatatgaatgagttttagaaaaccttgcagtggcataaaaaattgagatccccacaaccccatttcaagtgtgagtgtctgcctagggaatcttaattatttttaatgaagatgacattatatatttgatcagcatgggccatcctaaataacaaaattaatataaataaaatccttctgaataatatcacagcagagatttactttgaataaattattagttttgtctttggaggttaatcactctaccctctttattttttatttaatgttaagagtaaaatcaaatgaccagataaagtgcttttgtttgaaagaaattttcctaggtttgttgctttgctaaaagtagtgggttacttttatatactcatgagatttagagtattataaacatttttttttgtgggatctctgaaaagaagaattagtgtattattatttaagaataacctggttgatgttgatatttgtaatcacatttttttttccatttaaaaaatatcctaatacctgatggtagtcccccaatttaatggcattggaattaaatgcaagactcttgaatttgttttacagtgctgacatctgacattttaaaaatttatacctatattattatacttcctacctttcattgggttatattctgttctagttgcaaactgttttaagtatctgttataatttggagaaatgggatttgaattcatgaatctatagtctggtgtttgtttttatgaaagagtgtaaattacatgtttcaaaaaatgtttttaattaaattccattagtttttcttgaaactccttttctaagagaagtggcttgatgtctgtaccctgtttgaaaaaagatgggataactttcagtaactatgcttttaattttttctacctttgcagtaaccatagaaaaatattgcttatttctctttcttgcgtctttcattttgactaggtaaaaactaacacactcaaaatggaacctatcattgctggtcctgtaattaaccagctttcaaacctctttggcatgtttattctcaatactccatttattctcaatacttcgcaaccaatctacaacggagagctcaaaaatgccccttgtatccattttccttcttttgctactagaatcatcatcttcttctagtcttccagttctcttttttggtttattacattagcaacaataaaagttattacttattgaacacttaccatatgctggctactgtgttacagtgataaatgaattatcttattaacacaacagtcctatgaagtggaagggaaggaacttagggcttaggtaatgtgcccttggccactcagctagtattcagcagagctgggatttgaatccacaactgcctttggtccttgtatccatatttgaccctatgttatgttttcatttttgcataggtcttgctgccaagaactattctacaggcccagatcagatcaattcattcccctgctctataatgttactttagagggtttttataatttccaaatcttaagtcttgcctctaggtcttctatgattttggccaaatctactttttcgtccttctagttgtttacgattggtaaagatttactggctagaacaaaacaaaagatgccttcatagctaacactgatgattctatagtgaagatcatttagtgtttactgaagtagcacagtgcctggcaataaaagaggaaggcatccttcatggtcaggatttaataacacagaacccttcctttgaaactgaaaattatgtttagcgttttgccctatagtttaattggaagaacactgggcacctgcttcagtgctgattcctgatgcttgaacagtttagcattacccggggccatttaacttttgcaaatcccaacctcaacaatagaggttggttctatcgccttattcccatcttctccctagagacttaagaatagcaacttcttaaatagtcagtgaaaacatagctttaagaaataatagttgagatggaaactaaggtcgttgacaagatcttagaaatctttgtgtacacatctggaaaaaaaagttggaggatcaagttcaaaagcagtacagatataaagggaaacatacctttagccttatttacctggtcatggtgaagagttttttttttcttttgttttttggccattattaacgagctgactcttccctggaatggttacttaaaaggaatgagcgccaggtgcggtggctcacgcctgtaatcccagcactttgggaggccgaggtgggcggatcacctgaggtcaggagttcaagaccagcctggccaacatggtgaaaccccgtctctactaaaaatacaaaaattagccagacatggtggtgcacacctgtaatcccagctacttgggaggctgaggcaggagaatcacttgaacccaggaggtggaggttgcagtgagccgagatggcaccactgcactccagcctgggcaacagagcaagactctgtctaaaaaaaaaaaaagaaaaagaatgagctcagatgtgtatcaacattccatcgtgtttttttttgttttttttttttttagaaggaagaatgaattctcacaagtacttatttcctaagcctcaatctctctaggaatttgtttttaaaaatccaaggaaaaccttattggcaatgaactgtatatcagattcagccagttctataatacagcacaagtctgttcattacatggaatgcttctctgctggcttcattccttaaacttgaaattaatgtattgtggatagaatgaaaagcattcttatttcctgcctgcccaaaaccctttaaaggaaacactctagagtctgtaagttggacagtttcagggagtccaattcattgtgtttggatgcagtcctcctctccagtgctgacaatgagcaaactgatttcacctgcctgtatttgcatagtgtttgtggattcttccaggtttcttgattattaattaggcttgaagagattgagaagggagaaatcccagcaaacatctaatttaagtcaagagtttaatctgaggatgaataactctgctttctgtacctttgcttttcattagttaatgatttagaatgaatgtggttgtgtgtgtgtgtgtgtgtgtgtgtgtgtgtgtgtctgtgtaggggtgggaggagaaggagaaccagaacaatgacaaaaaagactgtcttgaagaacttattctgggaaagtaaacaaggtcaacaagaccataaactctgaaagaaccaatatctacctacagatgtgtttagactgattctcagcttattaacttgcacattaccccctggtgtctctttgttgctcaaacatggagaagcgtttgctataccagcacaggctgtgtgtgtttatacactgacgggtttggttggtgatactgctctttgtggtgggaaaatcttccatgttacagtttaatgccagactcattccgttacctgaatactggaagcttctgtaggacgtattagaaggtatcactacaccgtatattaaaatatggcaagccactatatactgtgaattgaaagatgagaaagaatgagtccctgtgttctagaaactcacaggatagggataagggtggggaggactagatatgtaaacaaatgattgcaatgccttttgtaaagtgttagaatagcgtgaggcccccaatgcataaagatcagaatactttccaaggaggtgaaaattaagggagtcttaatgataaaacttatcagggaaattagaggcaaattacattctaagtagcagagagagactcttcgagtggttctctgtgttttgaatttccagtggggtatggctgactcatagcagatgtacaacttgggcccttcttgtgaattaattaattgaatgcctactataggctggttctaggcactgaggacactgggaacaacaacaacaacaaaaagccctcgtgctcatgcagcatacgtattgtggagactgcagacacgagtagagcatcaggtgtgatggatgtgatgagctactggagttgctattttgcataaaatggcatttgagcagaggcctggaggtaggctgggagcaagcccatcccaaggagatgtgtttcagaaagtggaatggggagtaccaaggccctgcagctggagaacactcatcaagtttgagtggcaaactggaggccggtatgttgaggggtggggaaagaaaagaagggccaaggactggggagaagctcaaagggtgtgcatgataggtaaagactttggaaccaagataggacttggggttttactgtgaattcattggtaagccattggagagttttgggcctggaagtggcaagagacttagagtcttggagtcagacatatctgagttcaaatctactgtctatgtctgactcatcatctataaaatagggcttgttgttcttacttgaaagcttgtaacgaggaggaggaggagtaaagtagtggtactagtagtagtagcagcagcagcagtagtggtagaaggtaacagctcaggaggatttgttactgtttattggtattttttataacgagaggcaggacatgaatgagtgaattctgtaggattaggacaattacttgaatatgtgaggctggagttcccaacagagccccaaagaggggccttgcagggccaggcatggtggctcatacctgtaatcccagcattttgggagtccgaggcgggtgaattgcttgaggccaagggtttgagaccaacctggtcaacatggtgaaaccccgtctctactaaaaatacagaaattagccgggcgtggtggtgcaggcctatagccccagctacatgggaggctgagatacaagaatcacttgaacccaggcagcagagtttgcagtgagatgagattgtgccatcacactccagcctgggtgacagagtgagaccctgtctcaaaaacaagagagagaggcccttcagacaccgagctgttgtggctatagatggggaatattgcaaatacttgggtaactaggattcatccatatgtatttatagcagctgggcttttcagaggctgagagtggcccagcccacctctagtttttgaacctgttggtatattaataagtgaagaaatgccaaacagagttaccaacactaatgttttaaacgtatctgtttaccaaattaactcaatgtaaacatgcagtacaattgtgccatttatgaactaatttcagcatttgtttttaaagcattaattcagagaatactatacatgatgtgttctattagtggaatgcaagctcaaaattgaataatagatatctttttcttctctctctttttttttttttttttttgtgaagacggaatcttgctctgttgtccaggctggagtgcagtggcatgatctcggctcactgcaagctccgcctcctgggttcacgccattcttctgcctcagcctcctgagtagctgggactacaggcaccagccaccacatccggctaatttttttgtatttttactagagatggggtttcacagtgttagccaggatggtctcaacctcctgacctcgttatccacctgccttggcctccaaaagtgctgagattacagtcgtgagcccagcatttttttttttttttttgagacagagtctcactctgttacccaggctggagtgtagtggcatgttcttggctcactgcaacccctgcctcctgggttgcagaaattcttctgcctcagcctctggagtagctgggattacaggtgtgcaccatcatgcccagctaatttttgtacttttagtagaaacagagtttcaccatgttggccaggctggtcttgaactcctgacctcaggtgatccacccacctcggcctcccaaagtgctgggattacaggtgtgagccaccgcgcccggccatctttttctttctgttgtgttattttatctctgactgtgtgtaaaatctcattaggagagaagatcaaaagtatagatttggggctcttgataaatatgaagggcaggtaaacaaacaaaaagccttcctgttatatccccaactctgcacatcaggccttaataatattccctgttgaatgctgagcctgaggctcttgatgactttgcataatatttggatggaatgtcccttcctcacacttgccactacgtatcctgcagtatctgcttgcacttgcctcttctcccttgcactctgagcaattcaagggcaggactgtcttagtgctgcatcttccagagcctagcttggggctggcccatagcctgtgctcagtaacaggaaacagagttgggccatgactggcaagtgagcatttctaggacattcacctaaggaaggctgaagctaggacaatggaagctgatcaccttcttcagctcctggaaggaccaagagatctagatcccagattccagccccctggccttgcccttgggaagcctagagttgtgggattgcagtttcactctgctgcatattggatgtgagactttggtggaagttgctttgtcatgcattctgccaagccttagtttcctcatttgtagaacagggataccagtagatacttttcaggttggttaaggcagagacattacaaatcaaagtgcccgttccttcttctctttctcctgtcctctcaggaagcccactaaagcttatttcatctctaattctgaacttggtggacacaagtagaaagtggttaatatctaaagattgggaatatgtcccttttgccccctctaagtggtttagcagtagtagatattgcttttctttcttccctctccctccgtctttctccacctctttgttaagaaatttcttttagccagagcttacttttaagtatacttgatgggaatttggagggtttttttttttttttgagatagagttttgctcttgttgcccgggctggagtgcaatggcatgatcttggctcactgcaacctctgcctcctgggttcaagtgattctcctgcctcagcttcccaagtagctgagattacatgcatgtgccaccacacctggttaattttgtatttttagtagaggcagagtttcaccatgttggccagggtggtctcgtactcctgacctcaggtgatccacccacctcagcctcccaaagtgttgggattacaggcatgagccaccacagccagctctgggaatttggatttgtacagaaattcaatatagggagaccattactgacatttcaagaaattgacagtagaaatgtctccatttgaaacgtcccctagtaaaggacttttaaagcaatgtttagtaggccacctccctcagggccacctccatgagtcttacacatgctgacctcccctggcttcctctgggcctctggactcatctgtggtggtggggggcctaggaatctgccttttataacaagcaatccaagatgtgttttgtacccttaagtttgataaccaccacctttgcgtcagaaatccaatttatgcaactgttattgagcccctacattgtgctccccatcgtattcctcacgtaggtaataactaattaagtcctcaaagctgtgaccataaggttgatgttattgagatggtttacattccataaagtctcctatataaagtgtacaattcagtggtttttagtaagtttctagttatgcaatgatcacatgatctaattttagaacatttttcatcattccataaagaaatgttgtattcctcccttagtagtccctccccaaacatagatttattatacccatttttggagataggaaaatggagtctccaggcatttaaacaatatgccttcaactctagagtaaatgtggagccagcagccagagtccaacttccttgcttccagaacccatgctctttccactacacaatgcttcccatccaggaactcaagccaaattaaatatttacttggtggggagaataatttgatgttctggttttgtccttgttcagtagtttgggataataaattttccctttccgttccaactggcattgaggggtaaataaatatcgtttagtttctagttcggtgtgcagtacagccagattttgaaaattacatgacgaattagcatggtaaaaaatttaatagtgggaggctgagagttaggagaagtattcggtcctgcctctggttggtcacttatcacgtacctcctgcacgcttgatttcctcttctgtcaaatgagtagttgtaccaaatcttttatttagtcattaaacatttactgaacatgtatgggtgattaacactggatgttggatgttcggagaaaaccacaacagttttaataccagctacatttaattgggcaaaaacagtataccagatgctgtcttagctggtcatgccatttaatttgaagagcaaacctaataggtggctatgataaatctattctgtctctgtggggttggaggcatgttgctgaaattcccgtgaggaaacaggctcagacggtttggataatttgttctgggttacacacatctgacatacctgaagtctggaaaatccaaagcccagacctttgtccccacactagactgcctctctaggtgagcaggagtcctgttgccctctgtgagggtcaccgtatttgcagcatgatgtgaaagtaaatattcagtgacagcaccaaaagggctttaatcttttttgactctgcttgcttaggtctgggaaggtgtctcagaccagccctcctattctctttaaaggttagccgatgattgcgttttcccctcacccagtacttatgctgccctgcccagaaaaaaaaaaaattgtttgttgagcggtgctagattgggagggaccagcacctctgcaacatatttcttaacttcagtttactcctttggcctccttggcgtgtgcgtccaaaaccttgggctaaagtaaactggagatttggcttgttctcagacaggtgttcccatcaggtcttataaacaagggggaaaaaatcactttctcaaggacccaacttgaacttgaagaggccagtttgttgagactgggagcggagcttataaaggcaccgggagctaccagtgtcatagctggatctttaataccacagccatttcctgaaaatgtatagctttgcaaaagtcttgtcacttccgaaggcttcagaaatgctgatttggaggagttcctatcattaggaatgggacccaggtagtcccaaatgacattatttctatgaatacatgttctttttgaaggatttttaaaaagttactatttattgagctcttactatatgcaagaaataagtgctatactttcattgagcctcacaaaaaccagtgaagtagctattatcacctacattttatgaataagcaaatggaggcaaatccaacctctccaaggccaccctgctggtaagtggcaaagattttttttttaactccccattttatgtttcctttatttttaaccctaaaaacttaagaaaatttctacccagcatttatttattaagattatattgtgcatctgagtccagaaatccatcattcagtcaagatgttagttaataattattgttgagagtcatggcatgtggtgctgcagcctttacaggcaagggttgttaccatggcattcgatatgcgtgacaggcaccctggctgtgacagcctgaaaaacgatatagtcaggaggacctgggagtcatttatgtaatcatattagcatcacatttattccataaaggctcactactttgactcatggcttcaatttccacatttaaactcatcattttcaagattgattctatttaaattttcatcttaaaaaattcagcgcatcagtatttgggtactcccccctgcagcagtttcagagatatatttataattatttttaaacaatttaagtcagcaaatataattttcttgagacatcatatgacagaaagactcttagcattagtagcttttcaaaagtctagcaattggcatgtcagtaaaattctagcacaatggtagagtagaaattttaggttcacagtattttatagaatctaacccaatttcctgttttttatgtgagggaaactaagcctagggaggaggctaaatgacttcaccagactgtagagctagttcgcacagagctgcaatttgatattattagttatttaggttttgtgatgttttgacttatactttctgtacttgatgattgtactgaaaaagtatttatttgaataaaggaatataccagaatcgtatttatgaaaattctctctttggacgtgatataaatgaacacttcttcagaaaaacatccaaaacagcctcacagttagtagcatatttcgaagtattgaaaacttatcttcatctcagaatgcaacattgcaactgtgttttaaaccccaacagttgttttccattaagttattttaaaattattttttgaacaagtatttctcagtctcattctccaacactacttcatgcaagtgctatagggattgcaagactgaataaaactgcccctcacaggactttataatcttttgggggaggtaagacacatgggaaactcaacgtcagagcctctcaagcatcatactagaagatgatgctgttcatttggttcttagagttgtcacagacccttgggatgctaatggatttctaaatggactgcatttttttctttgcgaaaaggcttaggaacagtttaggaaagtgggtgcctggccctgagcatgtggaatataaacattcttaaagcacctattttatcatgtcactccccagttaaaaatccttttaacggctatttatttcttggcaaatatacatttattcatttacccattcaaaaaaatatttactaagtgcctaccacatgcataaaagccagctcctctccctggcttgaaaaccctgcacagtctatgtattccatttagttcagctttgtttccaaaagtgccccttatgaagcttggctttctgttaccacatgtgactttgtatcataattattggcttcagggcctctctagaatgtgaactttttcaggcaagaaacagcgtctttatctttgaacaccccatttccaaatatgcaggccaatgtgtagtgagtcctttgtaagttgaggccaatggggctagaatgtagggtccaaacgggcaaggattttcctgttataccctctcttgtatctctagggtctaaacagtacctggcccaaaatggggcttaataaatattttctttatgaatgtatactaagcgccagaccctcttagtgaatgctctgaaatgctctcacccaagctttttttctcttttcctatttaaatcttacctcaaaggcaagtccaagtttctcctctgctgaactctgacagcaccttgggcctgtgccaagcatactgagttcataccagagtctgtattgcactgttcactgttgctttttatttttttattcctaatttctctttccaactaaagggtgagtttcttaagggtatgggaccatattttatatagcttctgactcctttagaaaggacttgattgattgcgtgagacagtaattaaacatcagtcacttaagtctggaagattaagcatctcaggttttccagttccctttgtccttaatggatagattcccagagacctaagcatttgtgtgcattcgtgtacacacagaacactgaatattgaaggcttatataaagcaccaccctccaagaatacatgtatggccgctaaatacctccttttttttttcctttaaaagtgaaacaaaaattgccttaatggagatctagggggtaggggtggaggcgtttggtgttgggagagtgaaaataggggagtggaaatttggcaccatctgcaaagagtttgggcaactcgactttccatttctgagaggttgccatgtgcattgtcatgaatattacttttagtcaagttatattggctaacagcggactctttccaacatgtggaactaatttatttgacatttttcctcttacccactttgaaagccaaaacaacaacaaaaactcagtaacccttcagaacctttattgcatttagggaagtgtttccgtcttggtttgcctgcctttgttctctgggttcatgtttactcacccgctctcctggttttgaatgctgtaacaggaaatcaagtgatcaagactagaaactcttctcgctgagatgattgctttagattttccctgctaaatcagagtgcaggctgtccctttttccctgtaatttcttttgagggatggagtgaaccaaaataggcagccctttgtaaaggtgacacttgtcagcaaattgtgactctcccacatgctttcttaaaattcagagctcatgttggtttgtagggtgttaaagttaaatgccaccggactaaggaattcataatttgagttctttggcaaacttgaagtatccaagtggctgtgagtgtgtgtgtgtgtgtgtgcacgcccgcacgtgcacacgcacatacgaatacttaaagctgaaagaggagagggaaggaaaaatggaaggaaagacttgttaattgttgagagaaggggaacattttttagcctagggagaaaggatatcttcctgtttttgctagctggttgagtacccaaccaaaataaaataatgatctgtataatgtaatgcttaggctagtggatggatacacaatgcttattcatgctttttgtgtacaatccactgtgttaaggaatcatggcatgggccagttgtcaaggaattaacaataaggttaggacctagaaattctaaagactggaaggaaataaagtaaaatgtaaacaatattggtttttatggagtagtcagatacagatttttttcccttctttatatattttcaaatgttttgtaatggacatattactttgattgtagcatagacagtctttgctatagaactttagaaaatggagaaattgccattggtaggaggttgttaacaatgaggtgtggggctgggagcagtggtttacacctgtaatcccagcactttgggaggctgaagtggacagattgcttgagcccggaaattcgagaccaacctggacaacatagcgacaccctgtctctaccaaacaaaacaaaacaaaaccaacaaaaaaaacaaaaattagctaggcgtgctggtacgctcctgtatttccagctactcaggaggctgaggcgagaggatcactggagcctgggaggtcaagtctgcaatgagatgtgatcatgccactgcactccatccacctgggtgataagaaaacaaaaacagaatgaggtgggagttgagtcagtaaatatctaaacaggtatttttgttccccccatacctccaactatcatagaacaactatcattaatagaatgttattatagtcttaaaggattaactatagtaaaatagaataatagtagactatcatagaacaactatcattaatagaatgttattatagtcttaaaggattaactatagtaaaatagaataatagtagataactatcataatggtgtgtgaagtacatttataatatttttagtgcgctctatatgaattcatcttctcgtttatgagataaatgagttatgtaaagcacttagtgcctgacagatagtaagcactatataagcattagctattatcattatttatagcaacattaaaacaaaataaggaagtttgttgacctgggtcatgtgtacctgggcgtacagtttgatttgcacaaggtcgtctattgtgtcactgatgcatttttttttaattcccaaagtaagcctcttcctttgccatggttttcagtaactaagcatttccctttgttatacaaactggaatagccctggtttctcgcaagtcactgtgccattcaagacatagtttttatagtgagcatcaaacataagcctctgaatttattttctcctcagaaagctcttgaggtggtgtagagtctagttgtaactttggatgtatgtgcttttgtgagtttgacaactctgaaaaatgtttgtctttctctgttatatattcaattttaagatttgtgggggaagaaaggaaaaatatatattttagatatatattatttacaggcaagccctgttactattttgatcaacttctaggtgttacgtaagttttctctattaaactctattaaagatgatctttgcataggggattacagataaatttaggagtaagacaggctttgtattcagacttgaccatgtacttacaatattcagctttatcaaattaatctctcagaacctcagttccctcatctgtaaaatgaggatgtagttataaaggtcattgtaaatattaaatgagacaatatgttgcaaagcacctgagtgcattccaggcccttgggatacatggcaacattatgatacatagtacatccacacacacatcaacacacacacacacacacacacacgcataattagaataatatttatatatttaaatgctgctttacacatattaacaataaattttttatataaacatgcttttaatagctgcacaatgtttttgattggatgaagagtcttttaattggtttcctattgttggatacttaggttattttctatttttctttttagtggtaaccttttccatactcttggcaaactattttcttgaaccacctgtatccaaaatgaacaaattctgagattaaaaattgaccaaaggccaggcatggcggctcatgcctgttatcccagcactttgggaggccaaggtgggaagatggcttgaggcaagaagtttgagaccaatctcagtgacatagcgagatcctatctctaaaaaaaaatacatatatatatatatatatatatatttaaattagccagcagtggtgatgcacacgtcctagctacttgggaggctgaggcgagaggatcacttgagcccaggaattcaaagctgcagtgagctaggatcatgctactgcactccagcctgggtagcacagtgagactgtctctaaaataataattttaaaagtgaccaagatctatagcaacagatttttgacctcagaatgcagaataattagcctcatcagagaatgccgtttttattgggccttccatttgtttaatagtatgaggttaaatagtctggtaaaaatcagatgaggtctaatctggacaggagggttcccttcaaacctggtaaaagattattcatggggtatacttagggaagaatacagtcatacacattttatttcttaaaatacttaaattaggttttcattaattaccttttcagtgctttttttttttttttttttttttggtagaaacagggcttcgccatgtcagccatgtgatccaccggcctcggcctcccaaagggctaggattacaggcatgagtcaccacacccagccccatgatttttaaaaaaatttgtttaaatgacagcattttgtcttttaggggttagtgttggtcagcctcttgcgataacagtggtgatctatactttcctcccctttaaccacaatgcctggaatcataggaacagatccagagctgaatgaagccattactgaactgtcagccatatgtgcttgccacagagacccataaatagcaagagaataagcttttgaataaaaactcagtccacattttcttagcaaatatcagggagggagacccagagaatctcattaggcttgcaaaggtatttatttctttgctgtggtattctgctgtagcattcatttcaatatctagttaaaatttggcagagttgttggtggcgtgaaggttgggccaactgtctggactgaccatcttattaaacacacatgtaattgtccttgttccagcaaagtggaattctcttgctatctgtcaagcaggctcaattaatttgggagatttggtaagggaggagatgatggtttgggagggtgggtcagtggatggagagagggaaggactaaggtgcagccagtacaaggtggggaaagcaggctacccatgcacacgtgcgcacaaacacacacacacaccaagatgtttgtcttttttttttttcttccccttggagtagaggtagggggaactgtattcaactgttattatgtgactctaatttttaacttcatttgtgttgaacctgctcttttggggagggagcggggaggcagtgcttagggaataaaagaaaggaatatgtaaagagatttgatttaataatgtaacatacctttagaacatctaggttggatgaaactcagtaaagataccccttttcttgctgaaaattcagatttgtacagtactgttagttgggaagctggagaactaagcaatattgtatatacttaaagtgtgagggagcaattaaaatgtagcctcggggaaggctcaggagaccttatctgtgaattgctaggtgactcttcagttagcatagccccagttttatctggattatggattggggtttagatttttctttgagtttttataatagcccagttactagagtcttgcccttcctttttaagaatgcatcaatagttttaaaaatatacaaaacatttgtgtatttacaaaaacatttgagtagagtatattttagagagactacctagaatgtatgtttaaagtaaatttattgaagcatagcatacagaagaatgcacaaagtgtacatcttgatgaattctcacaaaagtgaacacatccggtaaccagcaaccacatcaagaaacagaaaatgtcagcatcccggaagctccttttatgccctattctattcattctcccacaaagaataaccactatcctgacttttaacaggctagattagttttgcctggttttgaactttatgtaaatggaattatatactttgtatgctagtgtctggcatctttcactcagtatcatgtttgtgagattcatcatgttgatgcatgttgcaatcgtttttcattctcatcactgaatattctgttatgcgaattcaccacagtttaattttctattgctgataggcatttgagtattctaggtaggtgctactacgagtagttttgctgtgtgaacattgttgtgtactgtacttgtcttttgatgaacacacaaccatgtgtctgcaaggtgtataccaaggattggaattgctgagtcataaatatccatataattaacttgagaagataccgccagttttccaaggtgcatgcattaatgagagaaaggtcagttttgtctctaaatcagagtgcttggttaccatgcacataagaataagacattttgttcttgttttcttttaattacagaaataaatgtaacagaagattctgtgaaatgtttctatttaaaataacattttaaaactcctcacctattttaatctgttcactatataataaaatatatttttagttttagtatttgataaagaattttaaaaacaagaaagagtaatgggcagggctgggcagtatctttggcttcatttccagggatttgcaaagtgaggagagttaacttctgactcccttggggttgtgttcacagtaagagttcagatttctgggattcctttagccctccggggagttgggataaaggaaagtgacaacttggaatagaaagcagaatgctcaccctgcctaccctaaccctgttactgtgagtaaatcatccaagaggactgaaggatcagacctgtcatgatggctcttcattttcttttcttttctctttttcgtttacttttttttttttgagacatggtctgattctgttagccaggctggagtgcagtagcacaatcttggctcactgcagcctctgcctcctgggctcaagtgatcctcccacctctgcctcctgagtagctgaactacccgtgggtgccgtcacacccggctaatatttatattttttcatatagatgaggttttgctatgttggccaggctggtcttgaactcctaagcttaagtgatccacctgcctcagccccccaaaattctgggattacagcatgagccaccactcccagtggctgatcattttcatgttttaggaaaaattttcctttccatttccattttccaagtcctctattaaccaggaaaatctttaccctgaagtcacaaaaatgttggctaggtgtatcattttgaattcctggctcttgcattaaaatcaaaagctcccaaaagccccgtactctatttcttttataattttacgtagcaatagaagtaataaaaaatataaaacctttgtctgggattctttaattaccctggacaatatatcttgcttaaaataaaatggatagaaaaaaacccccaaatgctcattttttttcctacatgcaagtattaggattcctaggctatacagaagaagaaggtgatatgaatgaatttgtttaatagctttgctaaatacagtgcctgtttttaactcaaggtctagatttaggcctcaatgctttaactttttacctgggatatattttctacctttggaagtgtagttttttagtctgtaaaatgtggtttcagacccctgccctgcctaccacatacagttgttatgaagatcaaatgcaataatttatgtgaaattgtaaagtataaaagtactaagcctttgagagctgggcttagcaggtcctgcattttaagaaagacgattactgtccattgacctagagcatagtgaaaattcaccctgtagtttgagatcttgtgcacacacataagcctgaacttttttgttgttgttttgtttgtttttctgagacagagtttcgctcttgttgcccaagctggagtgcaatggtgctttcttgactcactgcaacctctgcctcctgggttcgagcaattctcctccctcagcctcccaagtagccgggattacaggtgtgcaccaccatgcctggctaattttttgtatttttaatagaaacggggtttcaccatgttagccgggcttgtcttgaactcctgacctcaggtgatctgcccacctaagcctcccaaggtgctgggattacaggcatgagccaccgcacccagcctaagcctgaacttttaaccttgcaccaaatgtggctaattggttaagtcatgagttacttgtctaagttctactggcttcccatggcatctcactaaagttcttaaagctcctctccatcccacaccccaactacttgaggaaggagaaggggtaaaaaaaatgttttgctttggtgatagccccgaactataacctaacacatcccctttcacttctgggatcgatacgggtttatacaaaataagtagtctatagaattactactgcttacatttaaaacatctttcttgcttttaaaattttcttttgcccacccacatttattagatatgaagaatataaaaatgcttatgtcataaaaagatctactaagataaaagtattagtaatcactcctgttaagataataaatgagtaaaatagggaccaaaacacagcctcctgaacccttccgggcatatattctttattactactgaggacttcacctttgttttaacaaaaaggagaaggaagtatctgatttggccctttgtgggtgttggcttgagcagggtgcatctggagtagttcatgcctccttcatcagtcaactctggtggaagcatttgccaagatagaacagatactgtatcaattggaatatcactgccagaaaggaaataagaaattgaccatgtttatcaagatctggagtcactatatgaattatgttacttttaatacaaatgtactgttggcactatttaacagcttttggaaatcaaattgtatgagaatagagaatatattctggggggcatgggtggtaatgacattgaccaggcctctaagagcattataatgtagtgaactaagatgtcccccaaagatctgggagaggtctgtgggttcttaatccttcttccaaaatgagtatttcaggatttagaatcctaatgccccctgaatgtaaaacaccggtagtggtatctagagcagagccccataatcaaatacattggttgagatctgcatcaaaatgtataaatagcacactaagtggtttaacaaggactatacatacacatcagttcaagttaggattcactgccaaataagttcaggctattccgtattttgctaacaaatgtgttatgtaaaacttttgattttcagagccttttgaattttgaaattacacatagggattgttgatctgcattatgttcaggtgttagctcatgaccgcagcatcttttaatgtatgtaaagcaatcaggtagcaaattcttataagacaatagagttaggagcgccagatctgaagtcatattgcctgggttcagattccagccttgccaagtgatttgggggtatgttatttaatctcccagacccttagtttttcatctttaaagctacagtaattttgaaatgaacattaaataaaatatacacatgaggcacaatatctggattgccctaggcacttggtaaatatgcttcagtttcctcatctatgtagggataataatagtgcctatcacaaaggtgttttgtgaaagttaaataaataaatgtaatgtgcttagaatagtgtccactccattgtaagtattcagtagatattagccaatgataatatcattatgaacattactagagacctgtaatgaactttcataccagcagagtcattttcagaaaagaaaatgacagtaaacatctgttgaatgaatgagtgacacattggagaatgatgggaggcaccatgatttgtaataattttccagactgtaatttcatcctagtccttctcaagtttgtttgcttccctccatcctgcactccaccccccgaccaaacctccctctaagccccagcagcttgatcttcctccatttggtctgtttagatgtacattgcatgatgaacttggcttcacttatcttctgtaccacaaccatgcaggtgtgttaggccgtctgggaagctgtcccagatgctgacaaacccttggcagcaggatggaaaggaagaaggaaattttggctgacatctccaggtctgactccttactcatctggagagttcagtggtatctttaaagcttgaagataaatgataaggctgctgctctttttattttttttatttttttgctcctctagcagatacataacttagattctcattttttagtttgttatatgttaatctcttgtgattactcagtaacggtacagtttggtaaagtcataagtctgcagagacattttaaatagaggcaatgtatggaggagtaggtaccatctaggcagggaccagtggaagaatgtgtgtgcttgtgtgctgtagtttggcctaatgtcttggcacagctgtcatatttcctggcatgtaagaactggatcttctcttaagtccacacatatttggcaagccctattatgttactctcctgacggggtacttgagtaacgaaggtgatagataatattgggtaggtactgactgaacagggacatgagagaatatggaaagaatcccttttaaagatctttattgcattagatgttagtgtccgtaaacaattacagcattcagggagcgcaggatttaaatgagaaacacaacttggtcagattatactagtcggataaaatggcatggactccagaaatctataattaaatgtatttttgaaaatgaaaaatatagtgtaacacctggtttattttgctacagaggtgcctgggtattgcttacataagtgtgattgactttggctgatacttgggtttctctctgtaaaattactgcattttaattaaattttttttctactagattctatttgttgtaaacaaattattcacatacacactcatgtagaaaatgacttatttagaaaatctcatgttcattttcttttcattgcagcggatattcaactcctttgtttacactgagaaaatctcaaatggagaaagtgaagtacagcaggtaagaggcaatgagtacttgacactccctgtctttgtcttgcttttagatgtggcttcgtcactctttccaagcaatctccacttgaggtttcctgttctttctctctgtataatttcacgtgcatctcatgcataatggtgacaaccttacacttcagattcttagaggcggttaaaaacttatatgcatggttttctgctatccacgctataatttggaactatttaattcctttttgttttaaaaattcctaaatgactcacacctaaaaacactgaaaattattttatctgatgtagaaaataagtgtccaggctttggaatcagacagaccccacgtcaaattctggttttcctccttattttgtagccccagtaagcaatttagcctttttgagctgcagtttctcaatcttaaataagaggaacataatactgccttatggggttgtgagaattaaatgatgacaaattgaccaagaatgaaataaaattgtaattctggcatagaagcagctcattggatgttggcttcttttgttcttttctttttctttcctctttttttttttcctttgcttctcccctcccatcttctttcagttctctgtggagtcaagaagttttgaggtcagattctatttactttatttatagctggcttcagatgaactgcctcctaaaatatagtgttgatgaacctggtcgtaaataattgatctgtgcttgaaaagaagggtggtaaataggagttggttttaatttcagcgaatccaccaacttcattacagtatgtgaccatcaacaccatcaactagtaatttgaagctaggtttgaaactcaagtaaaaaacagaaccaagctaaaaaccagagtgtagcagactgcttccacagaatagaaagataactatagtaaactgcatacgattttgaactctctgagattccgccattattatgttcatggagaacagcttgacatttgcaagtgtccttatagtaaagttgtttgtaggatacttatttacttataataaattaccgtggtttaatcttgaagtgcagcatttcctgtttatagacattgagtttttaaagattgagtttctgcaggttaaatatagaggatataaatagtcatgtatatgtatgttctttttcttagctttagatatttttaaaagctgatggcctgagtatttatttattgtagtaaataggatgtagtttgctgtgctaagtcttatcttcataattcctgtcttatttttatttcagcaaactagaaagttctttatggtcgtgaaatttaagagattttttgtgggcgaagatttctgaacgaagcatgttcaaggaaactttctgggagaccagaggccatttgataacattttaaagaaactgatccagggatatcagttttgccactttccttcaagtaacagatacaagttcttacttaggctgttgtcaaatgtgaaagttttttccccccaccccctttgcactgatgtcattttttatttatctagctaggaacaagtttagaagcctttaacaataattttagaaattatacctgctgactgagcacttatggaacatcagggctaggcaacttccatgtatatcacattgatttttaccaaataaccttgaaggaaagatatcttattacagatgaggaaattggggctccaagaggtaaaataagttatttgtagttgatggatatcaagcaggacagctagcttttgaaataaatatgacagaaagttttattatttgtacttttattttgttttgttttttttttttttttgagacaggatcttgctctgtcgcccatgctggagtgcagtggtgggatcatagctcactgcatcctttatcttccaggcttgatcaagtgatcctcccatctcagcctctcaagtaacttggactacaggcacatgcccacatgcccggctgattttttgttgttgtttttagtaaagatgaggtcttgccatgttgcccaggctggtctcaaactcctcagcgcaaacaatcctcctgccatggccttccaaagtgctgggattacaggcatgggccactgtgcccagcctattatctgtatttttaatttaacatagtttatttttaaaatacatgttttcatcagatacaggagtctctgctaaactgtctttatctgaataattcaagtgcaagggaattatcgtacaatctattctgtgtgtcttattactgattgtcaaaaagttcttttttatttgaaccagaagggtactgacttttaaattcctccagtctctccactccatcctctggaagaacacttaacaaatagatctgtgtctgttgtttatcccaaaaatgaggacagttgtgtcgttgttattatcatttagcctaaattttagtataaacaggtcttaaataatttcttcttctgtgacatgatttccagatcctttcagtactgtggtcattattacaacaacataacaataaaagctcatatttacgcatttattgaaaaatttgctatcacttcattatgatggttctcccatgggttgaattgaacacgggatttctcattctacaatgagaacacagacacttcagtaccttcttgacttaaataactgcttagacattctagactctgtggtcctggacagtacccagaatgaaatctttagggacatgtttacctcgtatgtttcctattctgtaaaatatccgccatcacaatcactcacacttctatgtcctttgaacttcagaacaactccatgaggtaggtggcagtattgttattagcaatgttcagaaaggccacggatcccagctagtaggtaattaagctggcttttaaaacagttgtgaaatttatcaaatatatggagacgtgtaaaacatacatataaataaatatattaaaatgaacatcttaacttactacccagctaaagaaatgaagcattaccaaacttagaaggcccttgtatgaccttccaaagagaatatcttcctctctccctctcagaggtagccttatcctaattttttgttagcaattcccttgcatttttttgttttgatttgttttatatgtacttatccccaaattaattttgtgtttggctatttttgttctttatataaattttaagcatatgtttatattcacatatcttgctagtttcactcagcttcatattcattagaagcacccatgttgacatctgtaattaagggtcatttatttccatttctgtggtattccattatatgcaatttatgtatccattttatagctgacattgtttgggctgtttctaattttgttgttgttttgttttttaagagacaggttctcgctctgttgcccaggctggagtgcagtggcacgatcattgcccattgcagcctcaaactcctgagctcaagcaatcctcctgcctcagcctcccgagtagttgggactacatgtacaccactaaatctggctaatttttaaaattttattctaatgttttgatttttgttcatacctccgtacatagtacagaaggaataattcccttaattgcaggaattttattatccttggcctcctgccaacttaatgatggtagaactgtgtgttgtatgtgtgtctccacacaccactgccctaaatagtggggcaggtgacactattcagctcaggtggagaatcacttctctagagtagaagtgctgggtgtcagtgttcaacatgactgaataatgccagactgcttccacagtggctgtcatgggtcacttgcttatctgcatctcctttaatatctgatattgtctgatttttaatcctttgccaaatgtggggtgtctgaaatggtatcaggcgagtttcatttgcctcgctctgattactaatgaagttgaaacacctttttgcatgcttatagtaaatttttgtggttttgttttgtcaaatatctatgaatgctccttgtccagttttttagttgtttattttagaagtttaaaaatgctgtatatgttctagatcagtgctgtccaaagagaactttctgagatgatgatgttccatattagggcaagtagagtagctaccagccatgtatgactaccgagtaactgaaatgtgtctagagctactgataattaaattttaaataaaatagctacatgtggctggtagttaccatattaggttgctgtgcagatttatgattcgtaaataagtccttttagtttttgccttccttgtcttttcatctcattttattgtttttatgttttgtttggttttgagatagggttttgctctgtcactccagtttgagtgcttggtgcaatcacagctcactacagcctccacctttggggctcaagcattcctcccgcttcagcctcccaaatagctgggaccacaggcaggcaccaccatgcccagttcatttttgtattttttgtggagacagggtttctccacgttgcccaggctggtcttgaactcctgagctcaagcaatccaccatccttgccctccccaaagtactgcgattacaggcatgagccactgcagctggcctcattttatcttttaaagaattaacgttttaattttaactcagttttttaaaaaatcgatctttagacataaagatattctcctatactgccttctaaaacttctgcctctctcacttaagacttctttttgtttgtttgtttgttttgagatggagtcttgctctgtcacccaggctggagtgcagtggcacgatctcagctcactgcaacctccgcctcctgggttcaagggattcttctgcccttagcctcccgaggagccgggactacaggagtccaccaccatgcccgggtaatttttgtagttttagtagagatggggttttgccatgttgactggtctgatcttgaactcctgacctcaggtgatctgtccgcctcagtctcccaaagtcctgggattacaggcatgagccaccccgcctggcctcatttaagtattttatccacctggaattgattttggtgttggatgtgaagtaggtatccaatttccttttctttagtagatatccaatttccttttcttcccccatatgtgttttcaaatattctatctctgtcaaacaatctgtactttcttcatttgttttcagtgtgttttctgtcattagttgagtttttgtgtatgtatgaatttgatttggttccattagtctatttatctatccttgtgccagtaccacattatcttagtgactagttttataacaagttttgaaatctggttgggtaataccactccctgcatttagattccttggtttcccatcttcaaaccctgaggtttatctcctatccctggtgctctgtgctgtcattaaagtaaaaggtcaaggtctccagattatgcccacattctcaggaagaaagcagggtgtgacatgggcttacctcctagatttcctgctttcactttgtttgaggactcagtcttcctaacagcaattcaccagtttccccacttcttaatagttataagaacaattgtaaccgcttataggatttgtttgataaagtaaaaataggttagttattcaaagcagattattgacctgtgtgcttttagctcacaacctttaggtgaaagggaaccgtttctttatgcttggttttgtatattttgtattatctagaattctggcttgcattttctatccattatttctcctttgggttaatgaaaattagatgcccatgggttcttgccctccctctttactaatcaaatcttgttgagagttggatctttcttgtgcatactatctaacttggcaggaaatctaacatgttgttaatgtcctctggttaggggagcaaaggaattaacactaataaaaaacattttgtgattttttactcttgggtatacagttttacttgcttttactcatttcttttaaactaaccttcagagagtgtgggtctaaattgtctaacaatgtgttttaaatccttaattagttcactatatgtagttttgctgccaaagaaactatggcaacagccttggaaaaattaaaattccacgcacacattcttgtgtggaacacctctcatagacttcattttttaatactttaagaaattggcaaggcgggtggatcatgaggtcaggagatcgagaccatcctggctaacacggtgaaacccccgtctctactaaaaatacaaaaaattagccgggcgtggtggcgggcgcctgtagtcccagctacttgggaggctgaggcaggagaatggcgcgtgagcccgggaggcggagcttgcagtgagctgagatcacaccactgcactccagcctgggcaacagagcaagactccatctcgaaaaaaaaaaaaaaattaagttgtgtgtttgcttaagggtattatataaagttgaacttgaatcaagaaaaataaatttctgagcaaatgcctcagaaagtagcaaaatatggtctgcaaaacacaaagaagaaacaaaaggagaaggagcttcttggggggcttgattggatcattaaatggatcagagccaccttggacttgtttcaagagtttactcttaactttttctcaaatgctctagtaattatttatattaataatttactcaatgaaattgcaaacatattttcatagtgtttcagaaactgttgaattgatggcagtgatggttttagaggatttcagaattcctttgaaatgggtcagagagaactgagagaactccttatacaggagacgtacctgacatctggtcaagggcattcctctagcagctctccctgctcttctgcggtttttgatctgttttggatcatatccatcaccacgtaaacacatttcacctatattaaacaaacaaaagacccttttcttgaccccactttcctttccaactgctgtctaatttctttgtttccctttgagtcacaacccatcaaaagaggtgtccacactcattagatccagttctgccattttctttttctttttctctttttaaaaaattattattattattattattatttattttaacagagtctctcccagtcacccagcctggagtgcaatgcagcgatctcggctaactgcaacctccgcttcctgggttcaagcagttcttctgcctcagcctctcgagcagctgggattacaggcatgtgcctccacgcccagctaatttttgtatttttagtagagacagggtttcaccatgttggccaggcttttctcgaactcctgaccttgtgatccacccacctcggcctcccaaagtgctgggattacaggcatgagccaccacaccaggccctctgccattttctcttaagcctacttcagtcctacccatcccacaaatctactctctttaagatcaccaaggaccactactttgctaattcctcatttacttaactaacattagtgttgaacagttgatccttttcatcttccttgataaatcttcctaacttgggtctttggaatagcacgcttgcctccttgcctttccaggcacattcctttgcacaaggtgctgttcagacgaagatccccatgggccctcacctccttcaagtctgttctcccatgtcaccttctcaatgaggtgagcaccattttcaaagctgcagcccaccttgcttccatgctcctgattttccttttccttgttccatatttccttttttcccctatcacttatcactttttggatttagatactgacttgataaaaccagtttggctatgaaaattctggaagacaagctaagcaataaccatcctggacattggaacaggcaaagatttcacgacaaagacaccaagagcaatttcaacaaaagcaaaaattgacaaacgggatctaattgaaggtaagagcctctgcacagcgaaagaagctatcaacagagtaaataggcaacctacagaaagggagaaaatttttgcaaactatacatctgacaaaggtgtaacatctagcatctataaggaacttaaacaaatttacaagagaaaaacaaccccattaaaaagtgggcaaagaacgtgaacagacacttctcaaaagaagacatacatcttcccaacaagcatatgaagaaaagctcaatatcactgatcattagagaaatgcaaatcagaaccacaatgagataccatctcacaccagtcagaatggctatcatcaaaaaagccaaaaattaacagatgctggcgaggttgcagagaaaagggaacactaatacactgttggtgggagtgtaaattagttcaaccattgtggaaagcagtatggcgattcctcgaagagctaaaaatggaactatcatttgatccagcaatcccattattgggtatatacccagaggaatataagcattctactctaaagacacatgtgtgcgaatgttcattgccacactgttcacgatagcaaagacttggaatcaacctaaatgcccatcaatgacaaactggataaagaaattgtggtatatatgtacactatggaatattatgcaaccataaaacaagatcatgtcttttgcaggaacatggatggagctgaaggctattacccttagcaaactaatgcagaaacagcaaaccaaatactgtatgttctcacttataagtaagtgggagctaaatgatgagaactcatgaacacaaagaaggaaacaacagacactggggtttacttgacaggagaggataggaggagggagaggagcagaaaagatgactactgggtactgagcttaatacctgggtgataaaataatatgtacaacaaacccccatgacatgtgtttctctatgaacaaaccttcacatgtacacccaaacctaaaattaaaaaaacaaaataaacaaacaaaccaaaaaaacaagtttggaagtattccttcctcctttactttctgaaggaaaggtgttatttcttcctgcagtgtttgatagaattcaggagagcaccatctggacctgatattttctctgcgagcaggtttttgagcatccagtttctttaatagatatagatagagtttcttattttgtttttgctgctgtccttttgtttttgtttccttgttttttagatcttctgtatcctagtatgtcaattttggtaagttgatattttaaaaaagaaatttgctattttcatctaagctgtcaaatttgttggcataaaggtgtttgtaataatctgtatctttttaatatctatcagcaagaagaagagcaatagagccaagtcaataaaaccaaatgctggctagttctttgaaaagatcaataaaatggatcaacttctagctagacagacaaaatcagagatagaatgaatggtaaaatattagtgatgacttattttttcaaaaaatgaatttggcttccttaattttctcttgttttctattacacagatttatgttctttattatttccttccttgtactttaggttttgttctttttctagtgttttaggttggaacattagatcactgatttttttacctttttttcaaatggatgcatttaaagctataaacgtttctcttagtacactttatatacctcaaagtttgacatgatgtatttctatcatcattcagttttacatattttctgatttctcttgtgatttttaaattttgacccatggatttttaagtattttgttcaattttcaaaacgttgtggtctttagatatcttattgttattgatttctaatttaattccattatggtcagagaacatactgtttgatttcaatcctttttaattaattgagacctgggttttatggctctacatatgatcagtcttggtggatataccaagtgaacttgtaaagaacatgtgttctgcagtttttaggtgttctttatgtattaaggtggttgataatgttgttcacatcatttgtgtatgggctgatttttattttgtttgatttttattttctatcatttgttgaaagggatgttaaaatcttcaactgtaatggtgaaatagtattgtttccatttaattctgttcatttttgcctgatatgtctttatatacacatttaagattatgtcttcctgatgagttgtgaattagaacattatgaaatgttattctccagtaatattattctctccttaaagtctattttactcaatattgatatagcaactccatcctttatatacttactgtttacatggtgtgccttttcagaagcatttactttcaattatagatagcatatagatgagacttgtttttttttaaatctattctgaaaatttctgattttattattaggaatatttaggggaaatgtttaataaattaatattttgggttttttttctgttttttttttcattagctcctccttcccaacccacttttgaattttatctgttaatattctatcaacttcacacaaaatctaaaacccttgcaacttacaggttcatttctctaacgctattctttatgctagttatcatatctattacatctgcgtatattacaaactgcacaagaaaatgttatagcttttgctctaaattgccatatttaatgaagttaaaagaaaaaatattgtatattctcacataattactatatttcttatgctctttgtttctttctaaagataacagctgatattgaatctgaagttcctttaatatttcttgtagtgaagataccctagtgacaaatcctcttagttttttattatttcttgtatacagaaaatgtttcttggctacatgcagtagctcacactcgtaatcccagcactttgagaagctgagatgggaggatcgcttgagcccaggagttcaagaccagcccaggcaacatagggagacacccattgtctacaatttttttctttttaattagctaggagtggtggcacatgcctgtagtcccagctattcaggaggctgaggtgggacgattggttgagccaaggaggttgaggctacagtgaactgtgatgatgccgctgcactccagtctggggaacagagcaagacactgtctccaaaaaaaaaaaaaaaaagtttctattttgccttttttcttaaaagatatttttgctttagatagaattctgaattgacagtttgttttttgaacactttaaaaatgttccactgtctgctggactctgtagtttctgatgataaatcagtgaaagtttttgttaccctgtatgcaatgttttttgtttattcatttaattattctggctgcgctcaagatttttctctgcttccgttttcagcaatttgactatgattatgcctccctagacataatggtttaaatattgattctgcttggtgtttgttgagcttttggaatctgtaaatttgtgtctttcatcaaatttggggactttgggaccatgattttttcaaatatattttctgtctcattatttgctctccttgtaggtctctgattacaggtatgctagatcttttgatattttactacaaatccctgagacagtgtctttttcttctctttttaaattttttttctcttggataaagataaagatggtttattcttatgctgcagaatttcctttttttttttttttttttgagacagagtcttgctctgccaccaggctggagtgcagtggcatgatctcagctcactgcaacctccgcctcccaggttcaagcaatttccctgcctcagcctcccaagtagctgggattacaggcatgtgccaccacacctggctaatttttttttttttttttttgtattttagtagagatggggtttcaccatgttgaccaagatggtgtcgatctcctgaccttgtgatctgcctgccttggcctcccaaagtgctgggattacaggagtgagccactgtgcctggccctatttgtttctttttaataattctgtttctgtactgaaatttctcattttattcaagcgtattatctttgcattcttgagcatagttataatagctgctttaacatttcgtctgctcattttaacatctaaaaatggtttgaggtttatctctgttgactgtcttttttcttgagaattggtcacactgcttttttcttcatatatcaaaaagttttggttgtatcctggtattgtggaaaaatctggattctgttatattcttgtgaggagtgtttgtttgttttagcaggcaattaacttgactggaatcaaactgctaatctattttttagacaactgctcaaaactcagctcagtttatctttagatagagtttgccctgcacacatacagttcagggatttaagaatttttctgccccacccccacccagtactctagtatttaaaatatattctgacagacagttttttggagtatttttctgagttgttatttgataatgagaattttacaggaaaggtttaaaatttgatgttttatttctccaaatatctgctgggacattgtaaaggagaagcagtttggttttataagaaaatgatacttagcaggtattaatactccaaataattattttactcaagtatacactcaaggctctagacatgaagaattggaaaaggtcaaagcaatgaactagaattcacctgaaagcaagatatacttccagatgtagaccttgcatgaaattctatccttttgttcatatgagaataaagatgcctggtagcagaacaacttacatgtggcctacaaacacagaatagctctttctttaaagaaattttgaattgagggtgaaccttaaagagacagcactttatgtgccccgatgtgaatcatcagtcctaactaaggtgatgttttagaattttggagctggtatactcagataccatggagacaaggccaaaggggttaggaaacttttctctagtcttttttggacagcctcagtaagggtagtgtgggatacagaatcaaagagcctcatcttttgagatggaaaactcaaggtccaagcaagactctgtcatttactgtttgatttgtaacaggtatttagcctttcagtgtctacatcaattttatctataaaatgtagataaaagttgtttaaaagattaggtggttgcctactctgtagtaggcattcagtattttgtgttctgcttccagattacaaaagggtgatataatgtcaatataaggataccaaaagaattcatgaaatgtcaccccaaaatattactttgaactgagggtacttggggaacagcaggtgcaagtagaggctttctctgagcaccacttgcatgcagagccttttctctgagctcctcttatctgtctaaagacggatcctccgaaaggaactcaattgtcatgaatcccctccctgggaattttatcaaccagggaagattaacttggatcacaggaggggagactagaggttgaccctatgcccagactatcacctcttctaagggctgctcagaaacaacttttattaccgactttttatctgtataacaagacaacctttattccccgtgcatttcttcccctcaccctcccataacttgtgtcgccacccccttccccagaagccccaagccctgatgcctttctgtaacttgggatgctgtatcagcatcaatcatctgacccttctttgaggctcctattttgtgagactcctgtgcatacttatgtaattaaatatttacataagtctttctcctgtcttatgtcagtttaatttgtaacccagccaaggaacctggaagggtagtgggatgccattttctctcccctgcagtgtgctacagagaagattgctattcttaatttgttatttaatcctcttgggtaaggcctagaaggaaaaatctgtaaatctgtaaactttaaaaggggaattttcaagagaaaatgttcacagaaggccctggaaggagctagtagaagcttttaatagaagcaaaactaattgagaagtgtgagactggacattatattagctttgcatttgtattacttttgtatttctactcccaaacactttccactataagaaagcttgagtgtgttcttgaattgtgtactgagccacaggaagaaaagggacaatggttagacaagagcgggtacagaagagttgagcactaggcaggtatttaatacatatttgttgaataatgactggagatactctggcacctcaatattcatatttccaggatctggatttgtttcgggttgccttgccaagtgtaatctagtatggtggtagcctgagggctctcattttgtttacaatttacctactgaagtattttaaaggctcagacttgtccaggctgcaggaatctggaaggtggggtggatgaattccgttctttctttgtccccaatttttccctcatctgtacccagggaatttgttcaggttgggtcctggtttagttcaccctcttacccagatccacacttggctctgtgttgattgtgcttgctaaatgttcattgaatgaatgaatggaaggcactaaatctgtaggaaggcaaaagaaaggttgagaggtattgatgccacccagatggagaatttacaatgaatcaagcaaggaccagagtaaacagggggctgttctgtccaaccagagccctggcaggtttacctggtttagtgtttatgtttccttgattggaaatcaatctctgtccgtcttagctcttactgttgttggtctgactctacagaaaagaagctaatttttatcatcttagaaaccctcttcctgagcctcttatcaaatcattgtattccctgtgaataaaagaggctggtggtctgtcatttctgaaagagagcctgagaggagacataattgttctaatatttatgtttctttatcagttttctttgtgcttctacacatattttctcattttatcctcttaatgacataagaagagcaggtattattatcctattttccataggagtaaactatttcagagaggtaataagtataaattgttcaagacctcagaaatgaatgtggcagtgaccagatgtttaatccaagtttagtgttttctttatttatattgtactggccgtgataataatcagcattacgtattgaatgtatgattaattaagcactatgattaaatcttttctcacataacttggctggttcccttgctagttcccttacatccttttattcttggctgaaatgatacctctcagggagggcttccttgaccactcatttataaattttattaattgcatctctctttagtttttacccccttctctattttatctccttacagtttatcatgtaggacataggtatgtatttatgtttttcattgtgtatctttccctaatagaatagaagctccgtgagggcgtggatttttgtctgttccatgtcttgatgtgcccccagcactattaaaactttgtccatgtagtatatggcaggtgctcagtaaaaatttgctgcatgaattaataatcctcaaaaacaactcttccagatttactgacaagaaaaattatgcacaaagaaattccctttccagggtcacccaagtagggggttagagaactgatttgaaattcaagtgtatttagattcagtgctccactgtatgttttcaattcccccccccccacaaggtatgggggaagtactgcctgtcttaccacagaatggaaggggctagactctgtcctcctcactccttcccctagcaattcctcttatttgtttggtatattgaaggttagtatgaggctttttttttttaatggtctttcgttttcccccagcaattcatcttatttgtttggaatgaggcttttttttaaatggtctatcacttttttttttttaaagggaagatttacaaacaattatactacagcaataattatgcaaagctgaatctgaatttctttttaaaacatgcaacaatattgtaattgggatgctctttaaagtttggaagaggcaagaaaaaaataaatattattagagctaatagataatatattcacatatatgttagagcttttagctctaataatatttagaattaaatattattaggggtatgtatatgtttattgcagagagtaaatggtatgtgttgcctcctctaaaagccaaaattaggtttcttgtggaagttaaactcctgagtatagggaccatgacagaatagttcacactgtagtgctctgtagatactggggaatgagtggataaactagattatgatctctttgagggagagattctaagcatacctctagtaagtggtaggcaggtgatgaactcagcacacatttgttgagtacttattctatacttggcattgtaggaagagaaacaaagagcttatcccaaggacgttgttaaattgcaggagcatttgttcatgcatttgatatttcttgctaatctcttgagggtgatgccctgatggactgtggatctcatctagtgtggcattaccttcatttctgttcaaattatgtatgtgtccctagaatcctaacaaatgccagacggttgcaagaattagtacacatataaatcgtgttgcattttggaaaagattttatttattcaacatgatagtttgtattcatttaacaaacactgcttcacataagtcatcccattaaatttgtgccacaaccctctgatacaaatacagttcttcgcctcattttgaggaaatcgagactcagagacattaagtaatttcctagaatcatggttgaattaggtgataggattgggattttagccaaagtggtctaactctaaaacccatgttcttaaccatgttctaaaaacatatgctgtgttgtttttcatactttttctgctgcaaattcatctgtacgttttcaatttttaaaatgaaggtggtttattttctcttgagagtcttacatcagctgatataagataaataatatgtctaaacaatgtaagtactatgatgaaaacttagctgctaaatgaggaaaagcaagtttaaatgctcagttgtcaggggtaaaacaatggtggagggtgccttctgtgctgttagcgacgagcttttagctctcataaatcacaaggatataactggagccttaggaggaagcgcgttatattactaatggatcatcctgcaggaacataaacaagacataaaaataagtgaagtccttgatgactcttttgtctttcttcccaattcatcattattccattattaacataaccttaagacagttggttataatttgtatcctcatggaatttctgttgggctattggggttttgttttgttttgttttgttttaaagtaagtacctcctaaataagaacttttagctaattgagtgagtgaaaaactgcagctgttggaccagtttgtgggatgaaagcgtaacattgttacgctttctccctttctgtcacacgggagaagctgataacaacttggcattcttagtgtagaactgtggttggtaagcttctgttagtatggtttccctggaggatatagcaacccttagatacctctcagaactcccggatctctcttcccatatgaagcctggacaatagtcaggatgcttggagtactgttcagctaggaaaaaacgagatgggcacagagagaggaagccacctgatagctccccatctccccaccccccatttgggatttggagccatcttgtttctattttaaggaaaacatacatgtaacctctgttctgtattcttatatatatatttgcaagttaaaatatatgtgaatgcatgcatgaaagcttaaatttctgtactaaatatagacccattgacttcaggggtatgtatagtacattagtcaatgtatgtgcctggtgttgaggtaagctgagataatcctgcttacatacactcatgcacacaccctgtgtatgcacatgttttatgtattgtattaaccatgtacacacaaaagcaatatatatctattgtttacagttattaattgtactccaggcacatatttactctttgtatgtacagttttttggtttttttgtttgtttgtttgttttgagatggagtttcactcttcttgcccaagctggagtgcaatggcgtgatctcatctcaccacaacctccgcctcctggattcaaacgattttcctgcctcagcctcccgagtagctgggattacaggcatgcgccaccacacccggctaattttttatttttagtagagatggggtctctccatgttggtcatgctggtctcgaactcccgacatcaggtgatccacccacctcagcctcccgaagtgctgggattacaggcatgagccaccacgcccagccttatgcacagtatttttatatttgtaaaaatagaaatacaaataaaaaaataaacacacacaaatatacaaatttaaaaatatacacctatgccatctatagaaaatagaatatttaaatctctcaccatcactgccaccaccacacacatttaagtcttggaaattctggttacaggttttttttagtggtagtgttgtttgagcaaaaccacagattagtccatttcctcattcccttgattctcatagtttgtgttcccactctaaggaaacaaatgaagggactggtactgcttctttagggggaatgggtgttgcaggcaggcccagctggagaggagcagcgggggccttgcggcagggcaggaagagacatgtaagctcccactctggtgtgcctctctctgtgttccagctgaaggaaacacactgggtgttacgtaagcagccattagtttagttttataaaagtcagcttttcacatagctctgcgatctatgtatgtgcagatgtcttctttcagtgaagcagacccttgaaaaaaacatggatctgggctttttactcaaatagtcaaacttcatttaactagaagggaatagactgagtccaagtcctcattttaaaggccagcaagcctgtatcatgagaaatgaacattccactaaaaatggaaacaagtaagcccattttacatgcatttccaatatctcaaggttgaatcgtatttggaaatgctgctaagggaacagccaagacttctccagccctctccctaccccagccctacctgactccatcctccacctaaaatggccgcacccactgaaaaataaaataacctcaaattatctgtactggcagaatgagtaaacataaactcatctgagaacatattataaaacctggcgagcaactcaagaacagggaccactcatccctaacatatcccatggtgcaataggaaatattttggtaatgatgtgaaggaattaattactgctcatatcaggaacccctgaattcagtaaatgctttgaaaatctggacccatgaaataacatgtggtgtggtaaaactggaaacctgccaagaactatagctttattttaatattaaaagactctggggaggtagggatcatgttgaaatagctgttcatgggcattcacactgggtgtcacttaagcagccattagtttagtccttttacatgctgcggagtcatgaggaagtgtcactgtcacatccgctgacatgcatgtcaggcctaccatggcaccagcctctaaaggaaggtgttagcggtgaatcctgcagccaaacagccaatagaaagcaggcatgccccagttcttctgtttgcagttcgccctgtcatcagataggggatgagaagaccttcctaaatccacctgtgacttagagagtgatattagatgcagcttggcaagggaacacacagaatagttcagagaaggatataataaaattgttgcggttcaggcaaatatcctcattcctctggttggaaacccatacgggaaacatttctttttgttgttgtttctagcaagtcttaatagcaggcaatgtactttccagcagcacccaacatttgcacctcactaagttgtggggggcgggcgggggtgagggtgctgttactgttggcttaaaaaattttttttcccaatgatattaaaaaaaaacttgtacctctggatcaacacttacagctatatgcctgcattgtaaagaccccaaaatctcaagagttgctttgccactgctaaagtatcttgaaactgaagcctagaaaggccttttctctattgagtgatattagcgcattacaactggcttcattgttcaaaggtaggaccagaagagaaagtgctcctgcctcctaatgccacgtcatactcaagactcaggtaatgtggatactcaaggccagtctttaacaattgaagaaatcaaacattcataagatgcttccttttgtactgtttttctttccttagttttaaaaggaatttactttgtacaaatttgttactctaaatatagaactccactgcacatgaggctgtgtcttgcaattatctttttaaatgaggcactaggagggagagaccttgcaattactgtaattgagctcatagtatcaatgaaatcttaaaatggcacaatgatatatttcattcaaaaggcatgctaagttaatattattttaaaaggggaaatagaaacatctagatttttaaaaattttagagaaggtcattgtgtctcaagattgtcatcccaggacttggattcagtaagtacttggccagtgtgagggtaaggaagtgcttagtggtaacagatacttgtttccttgccagtgtcatctttccactccactgctgagctaattgacgcttgctggcaaatgtttgatcgatattctctcaaagaagcccttgaagaaccctaacatgctgtggtcagttatcctctaacgggaggctaggtcaggtttcgtccttcatttatgcagcaaacatttttctgagtttctgcatagtgtgccaggctctggcccaggtcacaaggttggtttgtgacaagatattatttgcattgggtctggagaagagagtctgggctctgtgaaatttcaggttcccagagcctttctgacctatccatccccattgtctagcggcctcccttttatttgaaatgcgtctatgttacacttagtgtttataagttatgcacagatatttgttcttcaagtaagagttttatgtaggaagtgactgggtttgcttttcttttctacagttgagtgtagaaagcctggtctttcacaggccaccagagaattcccaagttcacgaacccatagtattttcccctttccctcgtgattaatattctacacaaaaagttgtgacgtaaaatgttggagattattctgtggctcctgctctctcctcttcccaattctcagcttctcgattttttttctaaggtcaagaataggtggaacttctttttccttgtgaaggaatagacggtaaactttcaaggcctgggcttatttcagatgtaaaagaatctcgggtcaggggctcctgttacagagtgaagtgaggagaagtgggttgaagcctgcctttccctttgtttcttttgttatgatctggttgttaagggtagagtggggtgaaaaacagggcaagagtccattgagcccttgagttgataaccttggcttttgggaggcttgggtgtgtattgcagtgactctcctgcaatacccaacacaaactgttatccaaaccaaccccattataacctttaaagcaaatgttcattttgcatgaagaaagaagctaagctgctggtctcaactgtttcccagggctcagcctccccctgttctctggcatgtcagcacttgcctcctgttttttccattgtactcctcccagctcagcacaggggccccacctctcgcaggatcagggtatgtgaccctggagcccagacagccttgcacataaatctttctggtccacctgcagatcgtctgtcagcagctgccctgtttctctgttggatgggctattccctcacatctgtcagactaccctgaagtctccacaggccagtggaaattcagactggccctactgcatctccaggtcttcatctatcttgtcctgtatcgtttcctgccatgcccaggctctgtcctactgagtaatttcatgaggcccaaactagtggtgatgagcagccatatcatgacagcggccagttgctatcagtatacctttctgaacaggtgctcttttgggggcaagtatggactgaatgtttgtgtcttccccaaattcatatgctgaagccctaacccccaatgtgatggtatttggaggtggggcctttgggaagtaattagggttagatgaggccgtgagggtggagcccccatgatggaatttaagcttttgtaagaagagacagaaacactagagtactctatataagacgaggaagagacagacactctgtctgccatgtgtggataccagaaggttgccatctgcaagctaggaaggagggccctcaccacacactgaatctgctgtcatcttgatctttgacttcccactttacagaactatgagaaataaatatttgttgtttatgccactgtatagtatttgtagaatagttggagctaagacagcaagacttgctttagagcagctgatattacctaggaagcagatcaagatagggaactggagaggccctgaagcttctgattggcttgaaccagatatgagtaatagtcataggttatctgcctttgtctacactcagaggaagatctttccaatatggcaaataatggtatattgtgtgggggcatgtgacattaacatctttaagtctcttctatgtgccaggcaacaaataaaaatgcacagtgcagtggttcaagaggatgaatgtgatctaattattctgtttattagctttgtgaccttgggcaagtcagtccattggaatcacctgtaaaaatagcatagggtgattaccaagggctgttgtgaagattaaaaggcatcaggtaaagtcacatgtcacacagtgccctaaacataatcagcaatcaattagttctaattattgttgtgttattggtttgttgggataaacagggtcttcaaatgaggtaagaacaagaacagtgtgaagcagaaagtgagtggaacaaatggtgagtcctaggaaattctggaaaaggacagagaaggcttcaaagaggttgaaattgggctggaaccagaaggaatgagtagaatttagataatttgatctgggagagttcacatttttcttcaatttgagggagcttgttagcagaaagagaattgagctagagattagaagaaaaggtctttttgttttctacctttactcagcacgagcttgggcaaaccactgagcctcgatttccttgattgtaaaactgggacagagagaatatctgctccgcctagctcccagggttgttataaggcacaaatgagacacttcaggtaaaaatgctttgaaaatggtgaaatgcaacaacacaagagtaaggtcattattagagtcttaaaagaggatcccagaaaaagtctgagctgcccgagactgtaattacctatcctgtatgacacagtgctttagaagagtcactgacagctgtagtaaggtcatggcctactgctgacacatctatcctgactgtgttgactactcacccttctccacgtacagagaatgttctttggattctccatttgtacccagccattgttaagttcctcaaacaataataaccattacaataatagtaatagtaaacagccactaccatttatttggcgcttataatacattggatactctgctaagtactttacaaactttatcccacttagttctcaagcaacatcacaaagcagctattattatatccaatttagaggtaattaagttgaggcttagaaaaataacttgcctcgtctccttcagctagtaaatgacagctgaatttaactgaaacttctttgactacagccctctgtgccattttgcttttaatctaagaaaaaatgctttcccccacaagaccttgtgccagatttcccatgtagaattaaccatatggatgagttaaatgaataaaatggttagttaacattcagtttattacttatagctttatccttttacttctagctctgttgttagaaaatttagaccccacaatatttccccagttactactacctttctaggccagagactgtccactatgatagtaagaataatcccttgtatttgtcctagcctttgtatattcactgtgtttcatttgaacatcacaataagtcctttaagggatatcatttctgttttactcatgaggaactgatgctaagggaagtcaaggaatttgcccaaattcccagctaataagcgagagagctctatgtctgtctgaaccattatgactattactaatagaaagaatagcagagagtgagagcatttcttatatcctgtatatgatgtgcaacatgaaacaatgagaatattttctacgaagaacttcagaatgcagtggtgtgaggttcagagatgttaaatatttgtgcttaaaattatttttatgtcacatacattcaaataactaaactctgaaacttactagaaaacaaaatgcaaggtttattctttagtggtaaggctagagttgaaggaaataaggatcaactattaaattcttaccatggcacaaaggtttttgaatgtcaaatgttaaacttttctaggttcaataggaattttgctatgaatcttcagtcccctaggatatatttcctgtctgtgcctgtcagcttcattgttacgtattttaaataaagctttccctaacattcaaaactccttccggcccttccttttaggaagcagacataaataaagtacccactatgcctttgcatttttgttttcttttacctttttctaactatgtgcccaccccacccccaatcttctgaagtataaagctaaggtaaaaagagcttttaaaaaagggctctggggaagtatgcaaatgacagaaatgtctatgggaaaattaagggaaaagaaattcagcaagaaagaaattcattgatgttgtgatgaaacgttgtcactggagataatgacaaattagaatccgttcccatggggaccgcacgctacctactgatcatttgacccgtggctggatgttggctagcctaagaattgacccaaaagatgacaagatggttttagtcctgttgtctcatccgtattcaggaaccccttaggggatgaaggggaaaggataaagaaggataaaagatgaaagctgagctgtggaaagaaaaatgtttttaattacactgaggaggattgtgggtccacctgtagctttctgttgagaatgtctttgttttcttctgtctgcagggatcatggcaggatacagacccagaatctgtctggctttttggaagggtctacattggcccttcggtcctcttcagtttattggatacattcaggattaacctctctgtgggctgtctttactctgaggttctgttatgcttgctgagcagcctgggtttggttggcgtgctaacagagattccttttagagggaagaaaaaaaaaaaaagacgcgatagtggagcacaagatgaggtttccatagtgtgtcaccatcacattcctcgtcagaagcacacagggagctcctctcaggcagtgaggtggagggaggcaagagcacccccagtagtcaagagacttgtatgctccatatgcctcagtttcttcacttgtaaactgggcatcacagtgttctcttactatcctataatggtacatagtcaaggtgaaattctttaggaaaatactgaattctgaagaaaaggaacaatactagcactctgttctcttgccaggtggcaaaccaacaaaaaccccttgagtaatttgaacaatttaaaatagtttaatgtaatttattccatggtactcaggtaatattaggttttggtgggtttgtttgtttgttttttttttttagaattctttataacaaatttgatcatatccccacctctttcttgggaggtggggatggggtatcatagggtggagtgcagtggcacgatcaaggctcactgcagccgcaacatcctgggctcaggtgatcctcccgcctcagccctctgggtagctgggactacagatgcacaccaatattcttggctaattttttgtattttttggaagagacagtgtcccgctatgttgcccagactggtcttgaactcttgggctcaagtgatccacctgcctcagcctcccaaagtgttgggattacaggtgtgagcccctgctcctggccccttttttatatttgtggtaaaatttaataattctaaacttcttcaaagtacttgattttcataggaattttgaagaatattattagaaatcatattaatttttaaaaatctaattcttattataaagtaatgagactgtgcatagcttatggtatcctgccaagcatttcacaacatttgttaaaattgatttgaaaagaaatgtggggagagggttgatctccatattacaaagagaagcaatgttgagtaaaggttgaaggtttgggctctgaagtcagaatatgggtttgaatcccagccctaccacttactagctttgtaaccttgagcaaattaccccttagtgtctacttctggaaaatggaagtgtgcacctaatagggtcctttaaaggattaagttggtatatgcatgtgagaggcctaaaattgtgacttgtacatagttggcactcagcagatgttggcatttttcttagtaaggcaagatagaatgttgctacatgaaagactggggaatttctgactgacagctgtgaatccaagtagacagagcatggatttgacaccttttgtgaagtgccataggtgtttggactctgtattcttggtactttctgtctctattgatgaagaatgcagctgaaggcccaccctaaccaggaaggcaaaggcagacattctaccccgatcccccagtaaaacacacctctgccagggctgctctcccatcaaccagtcaccctgcaatcccaaggaagattcagttccacagccagcccagagttgaggaccttttaacattctgctctttgccttgtttgattatgttaacagaaattctcagcctgtgtgatttgtcatattttaatatttcaagccaccattgcagcttcttttaggtttggtttgtctgaggcaccgcagcgagtgcatgagcacacagactttgaatttgtataagtgaatggctcttccacttactttgtggctttgggctcatcacttaactcattgatataaaatgagaatacccacactgtaaggtcctggtagctattaaaattttctgaagaaccctgaaatctctttgcaacagatttacaactcacagggtacaatcttgataattttgatgatttagatgcagtgcctacatttaggagctttgtttcacctgcttcaatatgtatatcctaggatggaattcagctgatcctgcattttccagttttctgttgttgcataacaaaccacccaaaacttagtggcataaacaaacatgcttacaaattctgtgggtcaggattttgaccaggcacagcaaggatggcttatctctgcttcatgatgtccatggcttcatcaaggggctactctgggggctgaaattatctggaagtttcttggttcatgccacaacttgggctgggatgacttggaagacatgctaagctggggagctgccaactaagcactgactgtggcctctccatgtgtcttggacttcttacagctgcgtagctgacagctaccaagagtaagcgttccaagagacaggcatgtccttttatgacctagctttaggagtcacgtagtatcactttctctgtactccactagtagaagccatcataagcctacccagatttaagcagtggggacagggggacatgtagaccccacctgccaaagggtagacctgttaaagaatttgtaggaaatttctataaaaccactacactaggattatggcaccacactgggattatgtttccatctggggataaattagggccgctggcttctacctatagcaaagcaggccatacagactcttgcagctacttaatctgccattgtaaaatgaaagcagccgtaaacaatatgtaaacaaatgatcatgttccaataaatattaacagtaaaattagaatttcatgtaactactaaatattaaaaatattctcctttaaaaaacatttaaaagtgtaagaatcattcttagctcatggcctatgtagaaagaggcagtggaccagattggaatatcttgagtttagctagatctgactcttcaaagttagaatcctccaaatgtgtagaagaaacccttgggtatttctcaagtggaattaagagtgtgtgtgtgagagagaaggacatatgactacaaattttgtttttattttaaagtgaatttgtgaagatatttcaaaatttagttcttttaattacatcttatgttcattatgttacaaaacatttattcccaagggcaataaaggactatgcacttaatactcctatgtgggaaattaatgatatttactttatcagaagtcaggacctacaaagaaaaggtagaacttgcttcttgatggagcttccagaaatacatattgttgtatattttaaaaataagtatgttttaaaagagttgattattagaacagaagataaggttgatgactctcaggaatgaatttttaaaatctttatcacttcattaaatattttttctatgtctataatgccaggcagtgtgctagagcctgaagatacagtggtgaacaaaaacatatatcgtatgttatcttttaacatctggctatctcacgagactgtatgtcctaacagtgcttgtagtctcatgagatagccagatgttaaaaaaaaaaaacagcatcaaatttaatgtgtgttatgagatggcttatgcagggcattatgagaatataaggttttcaagctgggcctattgctctgacaccctctactgcccactgaatgtgaaagtctaggaaaagagggttgttagattagttgcaagctgctgtttaaaaaccacgttaacacgtttgataatgagtgaatagtcctctctccatatctaggccacgtgtgatggcctgtttaatattgctttggggaaggaaaaacaaagaatgaaaaaaattgcagttgttgaaatgtacaggattttttttccctgataagttatcattttggatgggtggagaattcaaatagaagaacagtttggaacctattgactgaattacaaattgggataatttactgatttttctctcaatcaaagtttttctgggtgacaaaatcatttgtacagcaaaccctagtaacgtgcaatttatccatgtaacaaatgtgctcatgtacccccgaacctaaaataaaaattggaaaagaaaaaataaattggtcagaatcatacccaagaatagcccttaaataaaacatctggttaataattatttgactgcaatcagaggatactgctaaagatttttagaggacccctgaaagggttatattaatatccttaataaaatgtgaattttttgcttaaaaagtgattttccaacacctgttaaaaaagcaatcaatcgaggtttcaaggtttctcatctgggccattagtggcatttgaaccagataattcttggttttggggtgctgtcctgtgcattgtaggatgtttaggagaatccctggcctctatctatctactttgcagcattctccaccaagttgtgacaatcaaaattttctccaaatgtcccctgagggtggcaaaaccaacagttgtctaaattaaactgggtttatatgttttaattcaatgacctcaatgaggaaaacctactttattttaatagtaagaagtctaggtcagggagtattgtgagtcattttgtacatttccaagacccacaactcctcctttgaaaatgataaaatgaatttggacaacccattatccaattaaacattatactcatatccctttgttatgtctggaagtttttctaaactttatagtttatataatttctagcaaggctgagaacctcagttatttaattgagaccctgaaagctatagaatatccctggaacaaaatcaagatttaaaattggcttgaaaataacaaatgaagatattttgatttgactccatgttctcagcctggaagctattggattgtgtgagacgcatgacccaaaggagatgattagttttcctccagtgtgatgataatgaatagcactacaaaaccaattagctataattctatcagtcatttcctttgggtaacattttgtttaaagggaagaaaaaacaacacagttttccttggagatctttgatgaagctgtggtatttgatgggaacaatggaggaaaaagcagtatgcttaccaatttgcttttattattcctgcatgaaagtaaatcatgatgaagtgttctgttcacagcagttaagaaagacatttgttcatcttaaaggtgtagcagaccaaacacaagtatatttctaagtgtgcatttcatttatatggattgtacaactccaaggaattgccattcacatggaagactgagaatggtgtcccctgggactgtgtagcaggagacactgaatgttgtttcctttccttctgttattatcccccttgaaaaaccgtgaacccagaaccacaagtaacagataatgtctctcctctttattctcccagtcattgtcgttgctctgtaacacacaatgcccactgtcatgctgacaataatgtcaacagtctttgttttcctttttccagcaaggtattttatggataggtattgttctatttaacgtgccgtcatctgttacaagaagatataattttactgttgtctgagtatccttctatgacttctgggcattgtgcaatttttatctcaacccacacaggggaatatgacttgggtgtgtgttgtttgttttacttgaattttaatatatgcagcttgtgacacagattactagtttattagaaaaaaatacaatgagttattgtcttggactttcgatttattttgctcactgtcatcccacagctagccaaaaaaatccgagagaagttcaaccgttacttggatgtggtcaatcggaacaagcaagttgtagaagcatcctatacggctcacctaacctctcccctaactgcaattcaagactgctgtactatcccaccttccatgatggagtaagactttaaaactttttgttgttgtataaaccagacattgaattgcttatacatttcatttcatattcaaaatacctgtgtttatttattgcaaattgtgtagcttgtttcccactatttaagataagccctttatctttagataagtgatttttaaagaaaatgtgattcagtgttctatagccaggaaattcctggaccctccctactcacctttttctcctgatgaaatgcaagttgaggagtatcaactatttatttgagtacagaatctaaatctagaaaattggaaatgctttgtcatgagtcaactattaagccatgtcacttgcttaatttaagggagtgccttttgtctttaaaagagtaaccaaaaattcccattccttactttagtagatactatctttaaaactcctatgggaaatgtgttttcagatcatattgaaacaggtttgtatctgcatgattgaggatatttttatttattggcctagtgatacttatatctggaggggtatagggctatgggatgctggaaattgtagtggaaagaacacttatctggaggtgcaaagagcttagttttaagtttgacttggtctttaattagctgtgtgtccttcatcaagttacttaatgtttatttttatgctcagttttctaccaatgtggaaaataatcttataccaattttctagtgctacttagaataaataaaagacgttaatatgtttttaaaatatgagtgtaaatgtaaattagtatttattattcctctctttgcatgacaagtgctcttgcggctaggcaaaggatggatataatggtttttggtggttaaatgatgctttgtttccataagcaagtttttacttattatgatttcttgctgggcttttaggtagcagggcatcctcaagtcattttatttctccatttatatgatgttaagatgtgcctttgtctggcttaccctgtctgtggcctgaagaaactcatactagttgttctctaaactaaatggaaagcatatataatttggaatgagactgtctggataggaattctacccctaacactcaatacccacatggtctttggatatttggtgtctttgagcaaccctgtctttatttctggaatgagaacaataactaatactccaggatgttgtgaacatttcagtgaaatcaaatgtgaaagtagtttgtaaactgtaatgttctaaacaagtattagctgtaatattgcatatttgtataccttcatatcagagtgaacatttcaatttttgttaggtattagttccttctcacaccactaataaagacatactttagactgggtaatttataaaggaaaagaggtttagtggacttacagttccacatggctggggaggcctcacaatcatggcggaaagtgaaggaggagcaaagacacgtcttatatggtggcaggaaagagtgtgtacaggggagctgccctttataaaaccgtcagatctcgtgaaacttactcactgtcacgagaacagcacaggaaaacccacccaccgattcaatcatctcccactgggtccttcccatgatatgtggggattatgggagctacaattcaagatgagatttaggtggggacacagccaaaccatattaggtataatcaaagattatcttttatagtggggcacctgtaacttaatgttttgacaaccttaccactatctaaaaataaaatgagggtccagttgggttttaggcccaaagaagaaaccattttcagggcaggaagaacagatagtaaggtaaggagaagttcttagagctagatttatgcatttttctcctagggaaagacatgtggcaatgtctggacgcattttcagttgtcacaacttaaaaggctggaagaaagctcctggcatctcgtgagtagagtccagggatactgctaaacatcctataacattcaggacagctccccaagacaaagaattaccttgcccaaaatgacagtagtgccaaggttgaaaaaccctggcttagcacattggggatcttcataaattcctaagtagaactagtgctctagaggggaaaaaacctgaaacttgaattggctggctgctactggtgaatctacccagtcacttgcccacctggtgaatttctatgaatgtttcaaggagcaactcaacaattgccctttcttcatagcttccaattacctctttctttcctctccttattcccttttgtccctggaagaatttattgctctctcatctttattcccatagtaatttccatacatctctatatagtgtagaacttaatgtatcagaccttgttgtgagttggcctccccttctgttctgggcaggaattacacctcatcttttattacccctagcacctggccattgtatttaatttttatactatttgttggaatctgaattgatttaaattgatataggaacgagtaagaaggtgtctactctctagaaatgtataagttactgggtgtggagtggcaaatattgagcataattaatagggcaaaatgtgacatagcagagaggtattgtggttcctcaaagcagagaactataccagataggttgtattggaaatgattttatgaacttcagaaatatgcctcttacttgatttggccattaggaggaacatcacaaaaatatatataatataaacatgtaaagaaaaataccgcagtaccatttagaatagagaaaattataaatactctaaatttctagcaatagaggattagttaggaaaattgtatcacatccatatatatgagatggtaagatgcagccatgctgttgaagctgacttgtgagaatggtcagacatacatacacacatgcatacattacacttgatattagccaaaaagccaagaacacacatgtgtgcattaagtttgggagtaaagacagtgatttccattttgaatatgttgagataagggttcaggtctgggatagaggccatctaatttggtaaaacccagtggtcaacctttttgttaatacaatcaagcataaaatgtagtttctgtcctttaggaacttctcatttagttagttgaacatccatgagaccttaactgtacccctagaaaaatacacaccaagtaagcagattagtaggagagaatgttcctccttcagaggtgggacctctgcactgaatgctgaagatgcagtattctctcctgaccaggagtagttgacagagccaagaactgcttggggtggatattggaaaaccaaagcagttctgaaggtaaagctgaacaatcagagaatgtacagataagcaatacaatgaacctccttcaacaaattttaaagatacctgacaacagagagatcttttgcaacaggaagtggcctgtgaggactcccttcaattatactgtgtctacttggctttgaatggagcccactttccagtgaaatgtgtgaaggaattttgggagtgaaccctgagctgatacttttctagactttggttgaacacaagcactttgtaaaattacaggaactcctcagttttttaatgaagatttaaaaatggaaagagttagtagtatgttgttgcagtgaacaagggtacaaattctcagctagccacctttgttccaacccctcagaaagtgctttatctgcatattctaacagctggggtgcctgctgaacacattttcagttcacgccttccttttgtttttttggagatagagtctcactctgtcacccaggctggagtgtgatggcaccgtctcggctcacttcagcctccatctaccaggctcaagcgcttctcacgcctcagtctcccaagaagctgggactacaggggcgtgccaccacgcccggctaatttttgtatttttagtagagatggggtttcaccattttggccaggctggtctcaagcttctgacctcaggtgatccacccaccttggcctcccaaagtgctggaattacaggcttgagccacacttgagcgactgcacccagctgacactttcctatattccaatccttccaaaaatgtctctattttgaatcttaacaacttcatgttggagttaggtgaggaaaggaagatctcctagtcttttgaagcagtctaaggatgtggttaaaaactttttttttaatactagggagatttggttttgaatctcatgaactcatatgtggacctttggaagtcacttattctgagcctcagtttcctcatcagtgagatgaggataatgagagtacccacctcacatggttgttatagaggagatgtttttaggttatacttagacatttttttaaatttgattaagtatttacttcaatatttactatgtcaacagtttttttttctctactggcaataacaaagtttctttttaatgtaaatgtagctaaataaaattgaattattttaaatgaaaacattaagtgaatgtgaccaaatgtttgaaagtgatagacatgtagtagtgactgaagttcatgaaaaatgggctcaagattattgctaaagtccttccaaactgtaagatattgtagttctatgaggcaaacgctttaaaaccgtttatgcctatggactgtatcttgccatatgtatatgtattaatactgcctttataataaatataagcagttggacctcagataagagacctccagtcttagttctgaatcttcttcattcttaagtcatctgggccttatgaacattttttttaaactcagcactgacccagtggtatgatggctgtttgttactaacattttaagtgcctgtggcctattgaccttgcttcttctccaaatatactaaagattagttagaactagacaatgtttttataagtaattttaactaatggctaatttttactttttgtctcaggcctaacttttcatttttaatgattataatccatatttggttttctccagtagtgcttaatagtacatattttttaaaaataaaatgcctagttctgaagagagaggagctttaaagacctttgttacagagcattaggctatagtatgacgacaacagagagaacctgcaaagtggcagaaaattcatttttcagacgggtttcatactttccttctcagaccagtcaactcttaaaattcttgcacaggagccttagaagttaattattctgcacaagacgctgcctagtgattaggtactctgtcaatgtttgttgttgaaggaatgatctaaagaatttgcattcttcaatatggaaaaaaataggctaaatttaatcaaaaacaaactcattttcaacggtatcacttaaaacaacatagttttgagagtgggctcatttatttatataatttaattcgcagctccctttgtgttcctttaggtgaggtgctagggacacaggagatcctgggctctcccacaaggagtgaacaaatgcataattacacctatggactatatctgatctacaggcatatttttttcggccctcagtgttttaaaggtttttaaatttgtaaattttaaaatctgttgccaacatttaaactttgaaagattagcaatttagaaatccaaatatctctcctctcttgaaaaatcagaagatttggcaatactggatccacactgctacttggtaacagtctgctttcatgaagagcagctcccctttcaggacaggggatgagttcctgacctgatgtgttatacccaacctattttcctgatttatatcactatttggcccaccttagctgtgaatttgcaattcctgaccttaaaagaccatacgatattaatagatttgacttaagaaaaatgtcttatccatgtgccttccctgttatgccaacttaaaaatgtccattctcattctctcaagttttaaagaatataactcctttaggcataacactaagaatagctatccctgaaacccagcttgccacagagatgaggttctgatgtgtgcttctaaagctattgtttattcagcaggccatactgatccttggcttttatataaacaaatcaatacttttttttttttttttcttaagacagagtctcgctctgttgtccaggctggagtgcagtggcacgatctcatgcctcagcctgctgagtagctgggattacaggtgcgccaccacgcccagctaatttttgtatttttgtagagaagcggtttcactgtgttggccaggctggtctcgaactcctggactcaagtgatctacccgcctcagcctcccaaagtgctgggattacaggcatgagccaccatgctgggcccagatcaatacttttattgtccacatcacttaattgatttatctatttctttccccaatttcttctatagacgttactacctgttggtattcttatttttttaatttttggtgtctttatttaaaaagaagggggcaaaggggagcataagctacggaggaaatactggaaagatgaatttagatttttattcttttttgtgtctccaagtggggttcagtgctgttatcctcatttagttaatgcatgttaattggctaatcatggttagaactggcattaaggcatctgtctggcttgatgagcaaatggatgctctgatggagttagagtaagtaagcaacttgtttccaaggttctctgaagccagccacctggagctggaagacttcagctgaatagatattctctcaggggaaacttaaaaagcttcactgattccaaaaatgaagaaactcttggaaccattgtcaaattggattcctgctattttacagggagctctttgagttggggcatccactgagattgatatagtcactgtggaaggcagataggactcatctcatcttttaagaacacaaatttagtgcatttccagctggcacccacttgaattatatgatttcaggaatcccatcttattcaacctcttgagggtattgtgctgcagacaaagcaattagcattaggttttgatacaagaacacaggctcctgattataataattctcatgaatagcaccgttataaccttgtgttagatagggtcctccaaagaagtagaaccaatagcgtgtgtgtgtgtgcgtgcgtgtgtgtgtgtacatacagagagatggatatttattgttaggaattagtattgtggaggtacaagtccaaaatacatggtaggctggcaagctggagactcaaaggagagttgcagttggagttcaaaggcagtctgctagggaaatttcttcttgcttacagaacgtctgtcattgttctactaagtccttcaattgatgaggcccactgatgttatggagaataatcaactttactcatcacctattatttaaatgttaatctcatctaaaacattttcttcacagaaacatctaaaatagtgtttggccaaacctatctgggtaacatagcccagccaagttgatataaagttatccctcctgcccttttaccccttttatctttagaaaggatagaaaagtgtactactaaacctatcattaaaattaaggttttgttaaccttcggatttagactggagaaggctaaactctcacagaactttctaccgtattctcctacacagcttctcttaaaaaagttaatgctcagccgggcgcagtggctcacgcctgtaatcccaacactttgggaggctgaggtgggcggatcacgaggtcaggagatcgagatcatcctggctaacatggtaaaaacccgtctctactaaaaacaaacaaaacaaacaaacaaaaaattagccgggcgtggtggcaggcgcctgtagtcccagctactcgggaggctgaggcaggagaatggcatgaacctgggaggcagagcttgcagtgagccaagatcggcgccacggcactccagcctgggcaacagagcaagactctgtctcaaaaaaaaaaaaaaaaaaaaaagttaatgctcatgtaactgagctgcctggaaaggaatctcagcatttgagtaattcttttttccctgtaaattggttgtgtattttgtggcatgatttagatgttgtatacatttctataataggatttcaagttctttaagtattattgacgtcatatgagccagaggtaacttactcagagggttgtttttaattttgatgattaacatgctgacccataatgttcagattcctgtacttagctctttaggaatttatagtagatttaaaagatacaatttccattcttaagggacttagcttcaagtcaagggttttgttttgttttgttttgttttgttttttaattatttgtttttaaactgaactcaagcatgagcttctatcatttctaagaagaggcaagtctttttattttatttgcagctactatggtgcaaaagaagtatcataagcagtaagttcagttgtgatgtaaattatacctgagtcatgtagtacaaagagtggatgggcctccactctgccactttgccatgtaatcttgggacgttcacttaacatctttggtcctcagtttcctcaactgtaaaatgagcagtttgaactatatttcagagactcttccaactttgaagactgatataattttcctcaaactccttagaagtttgtttggttgtttgtttgtttttaaactggagccatttgccattataggcaacttttcctactgctcaaattaataaattctgggttccatgagagagtttgtttttatctttttgagagtgaccttatggggggataaaagatgatatgcagcaagacttacagaggttaaatcactcactcatccattcgtttgaaaaaataaaggcttgtggaatggtttatggaagaaacatttcagctgggtatttaagcaggaagaggatttgaatatatggagatatggaggaagagctttccaggagaggaagctcaatatgaagaaaccccaagcgtagaaatgaccaggagcactgaagagggacttgcatatggagcaaatgatggaagaggcagctaagaagttggatcaatattagatcataaggatcctcaaatgctagactggagaatttaaactttgttcagtagggtttaggctccataagtgaagtaaagaacaatgtctatctttctcttgcttctgtatctatggtctaatacatagtagacactcaataaatattggttgcttgaatgagggaattaatttatgagttcttgagaaagggagtaaaatgatgagacctgaactttaagggaattccacttcttaatcatgtaacaactagaagtaactagaacctgatttcatttatgtaagcaaagagcaagaggaggcctggacttggatgttggctcctacttcttgagttttggaagagggaggaatcataggtggccaaagttgattttgggtaactgagagtgatggtaccaggtgctaaggcatatttgttctttatgtactctctcatctttcttagttactttagttcagggaccctgtcagatacaactgtattcaataccttgcttaaataggtcctcgataaatatttgccaaaggagttagtttgtggtagcaaaactgactttgtttttagtgtttgagtctcagtcactatgatgctgtcagaattaacaagctacttaccttctgggcagaaattgaacaatattattaaatacttttttgcctattcatgatagtcattgttttaatctgaacagtgttattacaagctctgatgtgaaacatgtttgatattgatttagttatctcagttatcagttatgcttaacagttttgttatatgcatgatgaatttaaaaaatatacattcccaaatgctgacatacatgtatatcattttcgactcaacttgtctgtaccatcttcaaggcagttaatgtataagacattgtactaggtactgtctgatggacaaagatgaataacacagtatgtacctccaagagctcataggacacatgtagagtaagctaaggcagtctgtggcaaatgtcataaaagaaatccaaagacttttagaggaggaagagattatgaacaaaggcctcgtaatgctcaagcttggtgaaaaagtggtagtcaaggccttgaagagtggaacttccacagatagatctaggggaaaaatgcttcagaccagaaaacagcaagtgtccatatagcaattgaggatggggaggtggaagacccagctggcacaatggaaaagagaaacaccatggtgggcttgaaacactaggtcagctacacaaatttctctcggtaagcagtagttttaaagcaaggaacggctgtggtcaggtcttgggcaaattaattagttggcaaatgaagaataaattacggtagaagggcaagttgcttgtcaagttgggccagttagataatcacagacaaagtaatgacaccttaaggtacaaaggtacaaaagcaaagacgtccaggggctggtgtattatatagagtgtcaaaatagggatgtacagtatgtggaatctggcaactaggttttcttggagagtttggtaaggaggaagattagaaatcacagctccaaattttaaattgagcattttaggagatgggaatctattaactaaagggtgaaaagaggagcaaaagaaaacttttaggagaaaaatgatggatccagtataaacatgctgatttggagttgcacgtagatcattcttgggagatgtttgctaagcagctgagattaacctgcagcaccattttattatcatcccactaatatttttacgcctgtaactatgtcatgtgcatggcagttcaggtgaaggtgaaatttgagatgtctacttttaatgttgtattaatgtacagttttgtgtagaatgatgtttcaagacatacagctgacccataagttggcaactcctatttttttctaatccaattttaaggtagtgcacatggaaaatatgatataaaatgtttaaccttatatacatcttatttcttattattactgtttttatgagaaataaaataatgtgacttaggtgcttataacttttgttcctttgttatctctgtgtcacaaggtcaaataatgtgacaagcttggtcctgaacaactgagtttaaattttttgcaagtcatattatttctccatgaagatatgttttgtgtttatgcccaatgaagtgttgtatggcaagtcttagtctttcaagtcattttcactgccttatctcacacttccatttccaatgcctttaaaaattattattacctgcaggccgactaaatgttactgatagcctttctggatattggtaccagaggactggagttgagctcaaatttaacaaagatattacagaaagctttgtatttatgaaaacttagttacatatgtttatacttcagtgaaatacttttttaggcctgttcctctttaaacaatgtgttacttacattacattcttcatatgtttctctgaacaacctggtggggtagaaactgtctctgcccacctccctcatccccacttttacagattaggaaataggcttagaaagtttatggcagggtaatcccagcactttgggaggccgaggcgtggggatcatctgaggttaggagttcgagaccagcctgtccaacatggtgaaaccccatctctacaaaaaatacaaaaattagctgcgcatgatggtgggcgcctgtaatcccagctagttgggaggctgaagtaagagaatcgcttgaactcgggaggcagaggttgcagtgagctgagatcgtgccattgcactccagcctgggcagcaagagcaaaactttgtctaaaaaaaaaaaaaaaagaaagaaaggttatggcaggacttactggagagccaggtttggaatttaggttttctgattccaaatgctgttttcttttaatggtactctgaccagtagtaaaattagaatggctcatctgccaagtgaaatgctaaactatgtgttccttcttagaattctacttgaggtaactagatgaccctccaaagttgctaaattggctgacctgcagcaatttgtgccatttccctgtgtgtgcttgtgtgtgtgcattaggtagatgtctttatctttaggagtcttgatgagtacccttatagcagaaagcgcctgcatttggatctgctgagaatctagcttcctgcgtttttcgtgtgaccttcattgaaggaagaatgggaaacctgcctcactgcttacgctattgaatttcaccagctgccttttatggattttaaatagagatggttttgtgatttttctttctttttaaaatctgatctctgtagaaaactgcctagcagactataccagctttaagaaatagaacctgtcttagctgaaaagcaacctttttgtgcatttttattgtgaaaaataccaaagcaatttcaaagaaggcccagatttaaaaatctatctataatctctttctggggacttgacttatctggtacgatgatgtagatatctgtctttacactctagctttattaacttgttaacattgggatagtattccttttgtagaatcagccataagtattctgcatcttatatttttctgtttctttaacagaacagggagatgtatggacaggactcttccctcctcggtgcatgtgtgctggtagatggaaccagttaatctccaaggtcatctgctaactcttagttgttagtgcctctcttttgtgtctgtgtcataccactcacagttgtctgctgtgtactgaatactcagtatgtgtgaggggagagaacacacccaatttacagtctccggtctctagtcctgggaaatctcaacctcttgggctttctgtgtgtatttatccagcagacattgactaaacttttgctcttcacaaggagactctgagctaggccctgggtataaagaaacataagaaaagacctctccctttgtgtctaccaagcaagggagaagggtatataaataaataactgtaaagtgtgtcaagtccctattagaggtcaagtggcaggatggacaggggtgctatggaacatcacagaggcagcctgcagaccccaccaagctgctctccccagcctgttctctctttgatttttccagatacccgtctttcttcatgtgccccagtccaacctggtgatgaggaagataaggataaatatttaatgtggttgtgcgcccacttccaattcaccctagatgtcacctgtgcaattttccaagcttttatgagaaagtgaattgaatgataataccatctgtttgaatatagaagtgagacacaaggtcacagcagggccttctctccataatctgttgtggtagggaaatggcgaaaaagaaatatggttggtctgtgtgatacttagacttaatagagagggagacactttattgctctgaaagccttaccttccaagggcatttgaaaccagcccttgtttccaatctggctgagttgctgaaccctgaaggtttaatccttattactgataagaaagaaagaatgtgacttatcactccaatctctgcagagatggaaggaaaaactatttctcggaatgtgattacatgttatttgacagctttttggttggcccatctatttaggtgtttgaataagtaaactcagtcgaggggggggttgagtattatttactttataaatgtgatagttcctttttgaagtgatcctgctcttgcccctttcctctaccattcaaacagagtttaaatatttgccagtgcagatgtttgatttttatcttagctctttctttgtttaactttattctcatgggtggttaagtggacgataaggaggttcttgtttaattcttttcaactggtgttgctcaaatatttggagagcagatgcttcccagaaagaatgagcgggaacctggttgaatagaggtgaagagatatgtctccgtgtcatatcacagtaaaccagaccctgttaggctgttactagggcccaggggcttagtaggcctgagtgtttctcagtgtccagaaccttcctttagcagctcctgcagctactggtgaagggtttttgccgcctttgttttccagaaaaacgtgtgctgttctaaaaacaaagcttggtaattcagtggcactggcagcaaaggcctgcttgtgttgtgacctcccatcagaagcctctcagcatttcttccatacccacttctgatctgataccaagttttgctttcagaagaaatgattttttttaaccttttgcacttatctcagcattttagcagtgattaaaaacaagcaaacaagtaaagaatattccctaccctattagctatcattacattggctttgtgtgtggacttgatgatcagtttccacagggatttgctttttaatcattaccttaaaaattcatccatgaacaattccacatttcatcactgcccttggaactgacactgtgggtgtgatttttatatgctatgtgataaatgaggcagacttctctggaaatattgagaaaaacccaggtttctgagtgatttgcctggcaaatcaccttccctaggaaatttaaacaaagaccaagaaaggaagtaaaccccaactggtgtgtgagtgggggggtgctggaggggaggcggggtctttatatctctttctttctaaactgggactccactgaaaagttgatttacactgtgaatcgaggctgaatgaaatccaattggaactcacttgaacactgttttgatgtaagattcaaagcttctgcaaatttattttatcttctacatttgctgatctcctgcttgtaaatcctgttgaaggagaataaaaatgactgcagcctgatgggaattaaatgtctgaagttcaaagcagtttgcacatcagagcaaacgtcaatcaagtgaacatcttgcaagccaggcagggagtgaatttctccatggggaagagatcaaagtgggagtcacagttctgttttctccctcgggatgcagtttcgatcagttgttcatgaaagtaaatccagaaggaagttttttttttgttgttttttttttttttttttttttttttaacttacaggggttggagagatggagttatttctcttgaaactgaatttcagacactggttttatcttatgaaaatgagcatagaatgcagttatagagtcagggtctaaaggagatttagatcagagttttctattgtcattactaactttttaaaagcacaggcatgaggaatgaagcaaaccaaacctcttaagttgaattgcccattcattttgtatgaaaatctatgattttaccacttcttggcctttccataaacccggaattatataaatgtgactggcagctaatgtacttcttaatgaaaaatcttttaggtaacccctaagaataagtgacatgtttttataaagtgtcctaagtatgagctttatatttctcacattctccaaatcagggcgaatagcatgtttctttttataagtcacttttctcaaaggcatatgggcataaaatgcattcctgtctttggcaaggtgactcttcctctggggaccagaggtagctaaagtaacaaggatggctgagcatgttttatccctgcgtgtggagtccggagtccagaaaaagcggcaggcattggagtgttagtgaagggtagaaagataagcactcttcacttttgcttccagtagttactcctgctagcctagccagtccaccagccctgtatatcttaagcccctattgacacctccttctttatctgaccggcacatcagtggtagtgagaaaagcagcagagtgaggttgatttctaggcttttcatgctaacttgactggcgagtgaatgctgcacggctgaaattcagcacatgtgagagaactcacggcagttgagactcttatgaaatacagtagatgttcaatgaatattatgaaataaaatgcccagagctttctggtgacttaactctctgccctttctcgttactcagtcaaccagtaagaatttatggaatgccccaccttccagcaactgtgctagacgtgagagagaaatataaatcctccagtaacctacagtcccattgggggaagctaaaatttctcaagtgcataaaaggttttagagagaattgagaattcaagagctacatggatagggtttagtcaaataggggttccatgataatcatcttttggaatttcaaccccatgtaactgtaacacacatgtatttggcatagggggaaggcaaaatgaataagataatttgttcattatttataataaatcttatttttaaattttattgatgcaatggtctgaatgtttgccttctctgtcccaaatttatgtgttggaaactaatcaccaatgtgatcatattaggaggaatatgattagatatattaatatcattaatattattatatattaatattaatatatattaatatcattgcctttgggaaataattagatcatgaaggcagagcccccatgaatggcattagtgcccttacaaaagaggtctcagagagctgccttacccctgtcactgaggtcacagtgaaaaggccacatctatgaaccagaaagtggcccctcaccagacactaaatctgccagtaccttaatcatggacttcccagcctccagacttgtgagaaatgaatttctgttgttcatgaaccagctagtttatagtccaaatggacgaagacaattgattagtgttttgttggtataagcagaatcttaaaaaaaatctatatctaatagataggactgtgatattatgttgtttgattacaaaataagaaaaataggaagaagacataggcatatagttaagaagcagaatggcattagtcagcttggaggaggaaggactcatcatgggccagtactagggagaaatttgaaagaggaagaagagttgagctgggctttgaagaaagggtggagtggacactggagagcatcacaattggggtcgaacagaagagcacatagggaggggccagtttcgttagaagtgtaggataggagttggtgggaagagaaggtcggatagattattgttgacaagtaccacatggtgaaactactttatgatggagaaatgtttatcaagcacctacttttgttaatgagtcactgtcatttttattgttataaaaatgtttttctttaatgctgttagagattaccttttcagcaaaggaagtaaaacaacctataataatagttccctgatgtccctggtcccacgagccagcctgcatttcacaaaggtccagaaaaatctatgtatcctcagcattggacttcagctctctcaaggggtgatgctgaaagcgacgtgctctctgtggagacttcatccagatagacaaaggctctctccaggtttatacatttcctgggaagatttgtcagtaaccctcttgagttgcaagttcttctttatttatcacttatgcagaatcgtatgtggtttgtctctggaaaggagttgagtgatgggtttaagtctctcttaggtccctgacttgctatgtgatctttggtgtcatttttctcaactgtgaaatgggtaggagaaagggttcataacttggagagcaaagtccagatgtcagctgcagatgtacctcagaactaccctattctcttcatctaaatccaatcagaagatccggtgtcttcggtctctttgagacctacagggaagtaccagtgctcatgcagaaagccattactttgctttatttctaaaagaatctgcatagcaggattggagggtacttctcattcctccagagcctgtgcaaatcagattccttggcctcaccccagactcactaaatcagactctcttaacggtggatcccaggaatctgcattctaacatacatcccaggtggttctgaagtagctagacttttagtattggaaccattcgactgagtcatggtcctcacttgccaagatttcttggagccttcaggggagcccagaacaggagtaggtaccctggatggtgtggatggtcataaaagaccaggtaatatgagcacctacttatgaccagaacaatgctaagcaatgtatgcagtggtgaacaaaatcaacaagacatggtgcttcccttcatggcactcttgtctatttatggaatctgatctataaaaaacatgaatagaacaataattttaaaattatggcacatgccttgacagaatatggaggcagttgacatagacttgggaagtcatcacaatcaggataggcctttctgaagaagggaaacgtgaagagagacctgaaggattactagacaagtaatcaggagaaccttctagccttccatttccaatatggtagccactcttcagtgactatttacaaactaagacgaaataaaatagaaaatttagtgtctctgttatgctagccacatttcaaatgctcagtagccacatgtgtctaacatgttggacagtgcaaatataatacattttcatcatcccagagacttctcttggattgccctggtctagaccagcagtggtgaaacaggtctggaataccacctgtttttgaaaattaagttttattggaacacagccatactcaattttttatgtattttcagtagctgctttcacactacaatggcagagcagttgcaacagtctttatggcccacaaagcctaaactattatctatccttttataaaaacatcagggagggaatagacttagtgtggctagctatagcatagagagaagtgagattatagtgatagtgccttgccagcatggacacagcagcagctgctgtattaatctcttattttccctccatctgtggcttctgaggcagcagtcttctcgtctagacaaactggagcaggtccaaggaagggcagccacgttggtgaagcaactgtgtcctttgaggcacagttgacattgtcggtgtaactctgcactaggttagagcctggactaacagtaaaatccagctatctccttctttgagatggtatgaaataaagcaagactgtttttagcttttgctgttgaaaccaacataccatgtgaaaacctagtccccttgcttgtacaatcagttccacgtgttcttatgtgttcttatgtgttaggagatgtgatcaacagataattaaagttcatgccagtggtcaaatggatattgctttttaggaatatttctcctagctttatagcttctctatttgggttcatggagttgcattagtggttcctgaagtttacattttaacacaaatttttttaaaaccttatttcaagttgcatttatgtgaggatctcttagaaactttgagagtcctctcagggtctgaaatcctaaatagtttacttagaagttcaagatccttcacttttgttactcctggatgaaattcacttaaaaatactctttatgactatatgtaaataagctggtatgttttcctattatattctttcagattgttggttgctatagcaatggatcattgattccactaatatttattgataagctactagctagaataatagcattgttctagctctagtactagcattacactaccactggaaatcaaaagacttttgccttatttgcatgacagcctagcaggtacaagctgtgtcatgtactataagaggaacttccatacattatttttaattttttttatggctttggaaaataagttttattatctttttcagataagaaaactgagacccagaaaaattgaataatctttctaatagtgacagagcagggtttcacatctagaccattcctactccacacccattcaaccttcactactgtctatttttgtacttggtcattggttttcaaataggataatttaaagaattctgttttacatgtaacatcagagctcccatctgattttttttttttttttgtagctctattttgaattttgtcatctattttctgtatgattttatcagtagtactgacttaagttcattggagaaaagtcgatttgaagaatggttgtttttatctttgaattgaatttgatttctaaaaccttctagaggcaggtgttccccccaccacacacagagttccgaaattatttttttgaatatttaaatctaaatcatagttgtactgtttacgggctgacctatcttgtacacaatgtaaaccattatttttgttggttggtttttctggcctgaataagtattgctaattctctcctattgtttcagattcgatgggaactttaataccaatgtgtctagaacaattagttgtgatcgactttctactactgttaatagccgggccttcaatccaggacgagacttaaattcaggtcagtaatccattggctttataaagatgaactgtattctactgcattcaagttgaataaacatattgcttcaatttttttttttaatttttgaagagaagtattatatacttaagattggatatttcttgctggaaagttaaccctcaagagagggagaggaagaagaaaaaatcaagcttacatctttttttttttttttttttttttttgaaacagtctcactctgttgcccaggctggagtgcagtgccgcgatctcggctcactgcaagctccgcctcccgggttcacaccattctcctgcctcagcctcccgagtagctgggactacaggcgcccaccaccacacccggttaattttttgtatttttagtagagacgggttttcactgtgttagccaggatggtctcaatctcctgacctcatgatctgctggccttggcctcccaaagtgctgagattacaggcgtgagccaccacgcccggccaatatcttaagcttctactagatagctatatatggtacatgccaaatacctttctatgctcttcaatctattaactcatttatcatgaattttacatctgttattttaaaggttattttagagacccagttatctttgcaataggaggtattggattttctttgcattccctagttacaatttttaatctgttttgggatttttctggaaaaatgctgtgagagcttttctattaataaacttagggccataataccatataccaaggttgaactttcttcctgttctcattggaactcagctgaaggtggtgttaataactactgggtactcatatttatataactactggttagctccaaagtgacctgatatctccacttttttgccctagagttccactccatatttctctttctttttgtcttatgtactcttgttgattgatacatctcagaacctagagggttcaccgtttaagagctggaaggaacttaagaaataataccatctccaatcctcagattttaccaagaaaaaaatctaaagcacgggaacccccccaaagactttccttattgctggaaagacaaagcatccttaaacatgaagaaccatacttcccaaattccaggtctcatgtagacacataaagccgaagagaaaggcagaggaccagaatatttacttttagggccccagtaggtctcagtttggggcagaaattgtaatctttgggaattgtatacacaaatcatgtaatctattaggtctgaaaagaataagctgtaagttgcatgtttcttaggcataataaaactatagctgctagataaatgatccaacctaaatctgcaaatctgctaggcatatcatttttcattggtcagatcatctggaaccctctgtagcaagtgaggtttactactagaaaggaagctaaatgagaatggttttcattacaaaaataacaaaagagggtagacaagggcatggaatgggcaggtaaattaacggggaggattccacaactggcacagggtgcaaagctggaaatcgagtctccaggttcccaaattcagttttttccctaaaacattcccaggtacatgagagatgttgcttgttctgaagacttgaggttgaaatagcaatctgaataggatcagatgtaagcgttccaaaaatacatactgtaatccaacattgtatgtagttaaattttttacaagtcatggtaactcatgggttgtttctttttttctttgagatagagtcttgctatgttgcccaggctggagtgcagtggcgtgatcatggctcactgcaacccctgcctcccgggttcaagcaattctcctgcctcagcctcccaagtagctgggattataggtgcccaccaccacacccagctaatttttgtattttttgtggagatggggtttcaccatgttggacaggctggtctcgaactcctaaccttgtggtctacccgcctcggccttccaaagtactgggattacaggcatgagccacctcgcctaggctttttttcttttttttctttgttttttttttttaaagacagagtcttgctctgtcacccaggctggagtgcagtgatgcagtcttggctcactgcaacctctgccttttgggttcaagcgattctcctgcctcagtctcccaagtagctgggattacagacacccaccaccgaccggctaatttttgtatttttagtagagatagggtttcaccatgttggccaggctggtctcgaactcctaaactcaggtggtccacctgcctcggcctcctaaagttctgggattacaagcatgagccaccgtgcctaccaagatttaagaattagtgtgcatttatacaataattaagttttaaatattagtgtgtatttaaataagatctagatggatcacacataaatgttaatagttattttttaatgatgaaacagtgggatatttttacttccttattaattttcttaatcttaaattaagcatttgctgtttttataatcagggaaaaaataaaaaaagaaggaattatggacgactttcaaatgcattttcactcctttctagtagacagtaccttccttaacgtatttctgataatagatcctaagtctggtgttgagattctagaagctccattaacctcctggctgtgtgactgggacagtaggaaagggcaggcttgggcagactgagtggggggtgtgctcacttggggtccagaatgatggtcccctgccaagaccacccacatcagtgggtcggtcagatcttggaggatctggaggctgtggcagccagggcctcatcctcattgccttattttttgtctatttattgtattgtttctgataatgagcacattgttgagatctggcttcattgttagaagtagtgttactttttcttagtgaatactcaggccattcttccaggttatggactttagcttttgctctgaatgagttagaaggccattgggagactttacacaggggaatctggggagtggcctctctagtatatggccataacctggaagaatggtctcctacctgttaagtggaaggaataagtacaactagaagtcatttgacaaatatttattaaatgccttctgcatagtaagtactcttttgttctaggtcaggagctgtaaacacacacacacacacacacacacgcacacacacgcacacagcttataatctggaggccaggggccaggagacatagaaacaagtgatatgttagaagatgatgaatgctatcaaggaaaagtaaagcagagatgagacatagggaatacggttggctgtcggggggaggagcagatgacttactatttcatctaagggtttgtgggtgagatctgagtaagtgggattgtagactatgggtttatctgggggcagcatatctggggcaaagaccttgaattgagtgactgtttggtgtgcttggaaactgcaagaaggccactgtaactgtggtggtgtgaaagagctgggagtagattaggccagagaggcagtcgggggccaggtcaccaagagccttattttactggccattataaggactttagcttttgctctgaatgagatagaaagccatcatgtggtggggtagttacatagagaagtgacatgatttgacttcggttaaaaggtttactgagccaagactagactggacaaggcaaaggtagaagtaggggaagacaacttagaaagttactccaaaatccaggcagcagatgatgatagcattaatagtgcagtgacagtggaggtgatgagaagcagttgaattctgaatatgttttgaaggtagaatcagtaggatttgctggtccattggatggtgggcagggtaggggaccaggtatgtgagagtaagagaggagtccagaaagacttctaagatccttggccttacaaggagaaggacagagttgtcatttattgtgatggggaatgctgggagaagagcaggtttgtgtgagaggcaggttattaaaagttacgtttgagatgctcattggatatctaagtagaagggcctcataagcagttggatatacaagtctgcagtctaggtaatagccaaggctagagattcattgtgtataggtagtactaaaatcatgaggctcatttagatcacgtagcaagtgactgtgggtagaaaagagaagggctccagggactgagtcttggggtgctttactgctgaggtgacactgagatgaagaggaagctggaaagggagctgagaagggcagtcaggcaggtagaaagaggaccaagaggactgtctccctgaagccaagtgaagaaagtgttgcaagaaagagggagagatcaactttgtcacctagtccctgtatgctgagggtccagaaaaccagccatatgatttagcaatgtagaggctatgggtgagcttgtcaagggttgtttggtagaatagtagcataggctgatcctagagggttcaagctctggagaacggaggagaggagtcagaggaaataaggacttgaactcctgagatttgctcaaaggaaagttagaaggccagatgagatcaagaagatattttttaattgagagaaattatactcagtttatgtgccaaagggaataatccagtagagattgacacaagagcaaggggagaagattgctagagctttttccctgattaggtaagagatactgcatcaccagtagaggacctagaagcacagagcattcattcatagcaagaagaggaaaggaagagtacatggatggagatgctcatatgatgatgggtatgaacgtggggacactcccttcttagtgattctgttttttcagagaattagaaagcaagatcatcagctgagagtgaggaccagggaataagcattaaagacctgttagtggtactaagattacctcctgttactgaggtttagactgaaactcagtgcacaaataatcccaacaaaatgctgatgtatttcagtgtttatttgtgaaggaagagagttcagatagtttgaaaattcagagggtggggaagaagagtgtggagagggcagaggtaagtagaatataaagaccagatcttgaatttttatatttctgtgagcatgtctcaagtataacctactacataacaagagttgttctcagcacagttgacacagctagatttacaagcagattttggcaatattcaggtatttaagaactgacttgcttgcatttgaagttttgcaacattctactaggcagtggctacatcccaaagtccacatacttgagcagttatttgtaatatgagaggagtgggacatggtgaaaggtgacctcagagttcccccttttcctcctgtacagctcatgccccttttcagagcagaattaatgtactttgtaggttatcacatgtctgatatttacatctgcaagatgtccagccttaggctctttcatactgtatataattcatcaatgggcccctaattgataacacagtttcagattgcctctcagactagctggaagcagactcacataaattataaaccattcttaacttcatttgtccaaaactgggtcgtgtgtccattcatccaacacatatgtgtattctttttcttaaaaccaccccagccagatccctactttctaaattgactccttgtccctgagtctattcaaataactaaagtttgacagtgcatgtgttatattatggttctggtaatgttttgctcaggttctttcctgcttttatccctactttctcactctctctcttttttttcttttaaattcctgctgagctattttcttgtgcatggcctgatccctaaagagagtttatttgaagagtccaagagaagttgcctcttgctctcttgagttatgcaattgaggtgagagtgaagtaggagttagtctttctcactgaaagaaaaagcgtctggactttctttattgcgtttgattttaaagagcatttgaagtcgcaaacttcgatcttggtaacattgcagtcttcattgagaaacgggattcacggggtgtaaggggcatttataagtcatgttacagaggtaaatgctataggataggatgtacaggtgggccttagaggctgtcgattgttgtggcttcatcatttccttctatgaatgataatgagtagctatgtactatgtgctataggtttttctctttaaaataccatgaaaattaccttttaaatatgcattagaaaagttatcctggtaacaattcaatgaaaaggccatgttctacctgaaataaagaagaaaaatcaaccaagctagaaatttctcattcctttttatgcccaattgcttcagcttcatgattgcattagtgtcataaaatatgtaattagttgtataacatttaaaagctgtttagtcactcagaaatgtagattcttgagcttgtatgattcagtttatattcgtatgtatgtgtgtatacttatgtatatgcatacacagaattaaggaactaaacaaacaaggtctctttctttacctgcttcccccttcaaactctattcctatactgcaaacttatatcaaagtttggtctttcttatagtttctcataacgaccctattacactgacttcagaagattttgttagccatatactggcatatatacatatatacacaacatatgtatataaatacaaatatatatacacactcacactcatactacatatcataatggatatagcctttttttaacttagcaaatgtatcctgaacttttttattttcataaaataagattttatgcagtaaaatcaataaaacaaatcttaatttgtttatttaagctcccacatgtagacatattgtattagtccactctcttgctgctaataataaagacatacctgagactaggtaatttataaaggaaagaggtttaattgactcacagttcagcatggctggggaggcctcaggaaacttacaatcatgactgaaggggaagcaaacatgtccttcttcacatggcagcagcaaggagaagtgaagagtgaagcagggaggaaaagccccttataaaacgatcagatctcctgagaactcactttcacaagaacagcatgaaggtaaccatccccatgattcagttacctcccactgggtccctcccatgacacatggggattatggaaactacagttcaagatgagatttaggtggggacacagccaaaccatatcattctgcctcagcccctctcaaaactaatgtcctgacaattcaaaacataatcatgcccttctaagagtcccccaaagtcttaactcattccaggattaactcaaaagtccaagtccacagtctcatctgagacaaggcaagtcccttccatctatgagctggtaaaatcaaaagcaagttagttacttcctagatacaatgggggtacaggcattgggcaaatagacctgttacaaatgggagaaattggccaaaacaaaggggctacaggccccatgcaagtcgaaaatcaaagagggcagtcattaaactttaaagttccaaaatgatctcctttgactagatgtcccacatccaggggtatgctgatacaagagatgagctcccacggcctggggcagctccgcccatgtggctttgcagggtaagcccacctcctggctcctatcacgggctagccttgagtgtttgcagcttttccaggtgcacagtgcaagctgtcagtgaatctaccattctggagtctggaggatggtggtcctcttctcaaaactttgctaggcagtgccccagtgggtactctgtgtgggggctccaaccccacatctcccttccacactgccctagcagaggttctccatgagtgccccacccctacagcaaacttctgcctggacatccaggtgtttccatacatcctctgaaatctaggcagaggctcccaaacctcggctcttgtcgcctgcacacccacaggcccaacaccacatggaacctgccaagacttggggcttgcatcctctgaagccatggcccaagctgtgccttggccccttttagccatggctggagctggagtggctgggacacagagcaccacatcctgaggcagcacagactagtgggtccctgagcctggccaaagaaaccatttattcctctgaggcctctgggcctgtgatgggaggggctgctctgaaggtctgtgacatgccctggagacattttcctcattgtcttggctgttaacattcggctccttgttacttaggcaaatttctgcagctggcttgaatttctccccaggaaatgggtttttcttttctaccacatggtcatgctgcacattttccaaaatttatgctctgcttcccttttaaatataaattccagttttagataatctctttgttcatgcatatatgcatacagttttagaaacagcaaggtcaactcttgaatgcattgttgcttagaaatttcttccttgccagataccctaaatcatctctctcaagttgaaagtttcacagattgccagggcagaagcaaaagtctctttgctaaagcatagcaagagtggcctttgctccagttcccaataagttcctcatccacatgtgagaccacctcagcctggacctcattgtccatatcactgtcagcattttggtccaagccattcaacaagtctctaggaagttccagactttccctcatcttcctgttttcttcagagccctccaatctctgctggttacccagtcccaaagtcacttccacattctcaggtatctttatagcagtgcctcgctacctcattgccaattttctgtattaatccatcctcatactgctatacagatactacatgagactgaggagtttgtgaagaaaagaggcttaattgactcacagttccacatggctatggaggcctcgggaaacttgtaatcatgttggaaggcaaagggcaagcaaggcatgtcttacatggcaacaggaggggattggggtgggggaactgccaaacacttaatgcatcagatttagtgagaactcactatcatgagaatagcatgggggaaactgcccccatgatccaattgcctcataccaggtttctccctaacatgtgaggattacaattcaagatgaggtttgggtggggacacagagccaaaacctatcatgaaccataaaagcataattcaaatgaaagttattatattatcttaatacaaagtatctctaatagaagtttttttataggattccatatatcaataccatttttgtatgcatttaccttttctatcatactgtgagatcacagaagcatttatctatctttatatcctcatgagcaaccatcttgttcagtcttcactgtataggtgcttatataatgtttattgaattaatgttggtggttacttatcgtcgttgttgctaaattttataatgagtatgtaaggaaaatacctaggtcattgaaggataagtctaggtagtagtatatagaacaatactcagatgttttcagggaaaatgagtcacatgcatttggctttctgcttagaattaattctctccctcttttcaaaaaacctggaagcatttgtttacagcatattttactgaatattttaagcccactctggagccccactcctcaaaaaaaaagattcccttctaaatattgctacccattgacagtgcacctggtcacccaagagctctgatggagatgtgccaggagattaatgttgttttcatgcctgctagtacagtgtccactctgcagccaatggatcaaggagtgatttttactttcaagtctaattatttaagaaatacatttcataaggctgtagctttcatagatagtgatttctctgatggatcagggcaaagtaaattaacaccttctggaaatgattcaccattctagatgccattaagaacatttgggattcatggaaggaggtcaaaatatcaacattaataggagtttggaagaagttgattctaaccttcatggatgactttgaggggcaagatttcagtggaggaagtcactgcaaatgtggtagaaataccaggaaaactagaattagaagtagagcctgaagatgtgcctcaattggtataatcttatgataaaacttagacaaatgaggagttgcttgttatggatgagcaatgaaaatagtttcttgagatggaatgtactcctagtgaagatgctgtgaacattgttgaaataacaacaaaggacttagaatattacatgaatttagctgatgaaacagcagctatagtgtagtgtagtgtaaaaatataaaaatataaaaaaataaaaatataaatataaaaagactatagtgttgtgtaaaaataactttcatatgcactgggaaaccaaaaacttcgtgtgactcactttattgccttactcactttattccaggggtcgagaactgagctgcagtatctccaaggtatggctacgtgtttaaaagtcaggctctcattgctccctggaagggtttcaagtgactcctctacagttttgcttgactattttgtagtagttgacatgtaaacctcttttttgaaactctcttatcatttggtttctataaaattactttctgctatttatcctcttatgtctctgtttaatccttatttttcctctggggctccattttctttattctgtagctcagagtagatgtccccacatatcctctcttaccatcctcctcacctcactaatcattatcttcctgaatgttctaagtttagccagcttcccagctcctgccacatgctggtgaattcacaatctctagctccagacctggtctatttctgagtttatttattgaataaccaccttcaggacacacatctcactgtgattttcctgtaggtaccacaaaacaaactttcctttgaatttgctccccagtctgggttccctgtcatattcagtattaccttcattctggttacactgggaatttttcctcaccattttccgctcagtacttctccaggttttatccattttgacctaatacgagtcattgtccacgtaagggtatgaataaataagtgaatatttgtcaagtattcactaagtactagacccctggctgggcatctccctgtgcattgctcttctttagtctagacaccagctgggcatctgcctatggattgcttttcttgcctggtctagacacctggctggacatctgcctatgtgttgctcttcttatttggtctggacagctgagtgggcatctgcctatgcattgttcttcttatttcatctaaacacctggctggacacctgtctgtgtgttgcttttctttttgtggtctagacacctggatggacacctgcctatgggttgttcttctttggtctagacatcttgttggacatttgcctataggttgctcttgtttggtctagacacctggctggacgtttgcctataggttactcttgtttggtctagacaccccgctgggtacctgcttgtgcattgctcttcttgttaggcctagatacccggctgtgcatctgcctgtgtgttgctcttgtttggtctagataccggctgggcatctgcctatgagtggctcttgattggtacactgacttgtgacataggtctcattgtcctctattcattgaaaaggaaatttggctcagattctgtagctaaaaatgagtcttgaatcccctttctttttcccctgctactgtggtaaatttagatcctcatttctcttctagaagaataattaacgtagagaccccccaaaaggtttccctgcttctcttccctctttttccacacatcctaaacacacactgagtattttgaaaaaatctcctctgtaactgcatttctcaaaagcctctgatggctccctttacatctaagctcacgttggagaccctgcacccccatcttctgctccttttccttgagtcctccaggctctagcctcaggaaatccctttcatttcttcagaatcacccacctccatcaccgctccgtacttttgatcacattattgtttcatcctacagcacgctgccagccgcctctgacatgtaaaacattgcttattcctaaggatccagcttccttgtcacctcccctcacccttctagataagaatttcttgtttgttgtaacaggttggctttctgagtaagcagactctgagatggaccttggcagcctatgaagaaagggaggaaaggagaattgagaatgggagagagcagggcttctacacagtgtcagcaaaggcctctgccaaccccaggactgcttggaagctggggtggccttccagggttgtgttggctcagctatgactctttatgactttactgtatggcacattcttactgcagatttttgattttttaagtgagatgcctacttgaccttgtgcttatttttatttatttattgtatgccaagtgcccaatccagtgccttgcccatagcacgtatacagtaaattcttattgaaagaaagaatgaaagtcactaggatttttgttgtgcttttgtttcctcttctgtataatggaataaccaagacttttgaaggacttcggtgaaaaaaggattgtgattgtgatttgctattagttggcagtggtttccttagctaagcagcaaatcaacacacataaatgtcccatgatgtggagtgacacagactatacaaatgaataatgtattccagagtcacatgaaaccatctatgatgagcccagacacacaatatatccaaaacaatcagtccgttccttcttagtacctcataaaccattttatactttcattttattcttaccatagataccaagggcagttataagcttcattttacagatgagaagttctgatctacctaaagtcaatgagcaattgttggtattgacgtggcttaacattatgtgtcctgactcctagtcaatggcctccctgagatagattgcttaagatgaagagatgtatttccatcactgtattctgcctactgacacttgaaactctttgtatctaaaaccatacctataaatagtctctctacccacccagacttcctccttggcccatgttctgtatgtcaattaacagcagcttcattttactagttacctaatcttgagacccagaataagttctgactccttcctggctctccctcgtgaagagcttctctcaagtgacaagcatgtggtggttaccgtgccagacaccaagataatgaagtgtattggtgagaggggagaggaggagaaaaatcaacagacaagttcaattatgataacatgctaagtgctgtgatgataaaggtgaaccctgggcacttgacccaggttgtgagctctgagctgggtcttttaaaaatggtaagaattacccaggtgatgtgcttgtggcaagcatgcattttggaatctataaaatatgcatgcagaatggatcattgtttaagaggtagttgagtatcagaaaataagagtaatgctaagccagattttaatggatcatttatatcagtctgaggtgttttgtttgggtttgtctggttgtgttttatgtgttttttaccctgaagccaaccaactgagagattttaagcaggggaggcaaaagagctttatggaaaatggaaggaagtgtagttagcctggaagaaggagtacctgggaccagaccattaaggtcatctaagagtgaaaggaagccagtggaaaggggccatggcataaacaaaatggctagatgcaggttgagtgggatggcaagaagtagagaatcggtgtagaccacccttcttagttgcatagctgagacaaggggaaagattactgataacttaggatataggaatgtttttcatcattattgctttttttttttaagttagagaaacttaaaaatgtttacatgccaaagacagagaaagaagtgaagcaaacggatgggaaaatggagattaatgtctcaggttagttgccccaaaccaaactgaacatcagagtcacctgggatgctttgtgaaaaaaaaacaaaacaaaacaaaacaaaaaaaaaaaccagcaaaactattgttcagccgccatgcagacctagtgaatcagaatgttggcttggtaatctgtgggttctaaaaactgtgatgatcatctaggcttgagaactaaatttttgttaattttctgttatttcttttataaatgcttgaagatcaccttgacctttgggtcctctgggaatggtctactagataggaagaagagagagtggtggagcccagaagtttatcccagaagtttattctagattccctgaacccatgaccaggctgtctcaaatgaatcaaggacagaatggactggttatttttgcattatataatcaacctaaaatggacacaaagagctatgagctcagaacacaatcaggggtttgaggatgcctgctccttagtcttagactaaaataataacaaggagataggaaaggattattgaattgccccaaggaacaggcttggtcaactgtcattagtttaacttttgcaatgggccttaactggcatgatcaatgtggtggcagatcactgagcaacatggcctatgtcccattcaggtcacagggtttaagtcactccctcctttctgaagcagaatatcctcagcttagaaagtggtaataatggctgggtgcagtggctcatgcctgtaatcccaatactttgggagaccaaggtgggtggatctcctgagatcagaagttcaagaccagcctggctaacatggtgaaaccccatttctactaaaaatacaaaaaattagccgggtgtggtggcatgtgcctgtaatcccagctactctggaggctgaggcaagagaatcacttgaatgcaggaggcagaggttgcagtgagtcaagatcatgccattgcgctccagcttgggcaacaagagtgaaactcagtctcaaaaaaaaaaaaaagtaacctgtctatgccttggtttcctgaataataaataaaacctacctcatagattaaaaaaaatagcaataacagtggataataaaacttacctcaaaacaaatagcaataacaatgaaaggcattcctgtatcctaagttatcagtaatctttccccttgtctcagctacacaactaagaagagtggtctacaccgattctctacttcttgccatcccactcaacctgcatctagtcattttgtttatgccatggcccctttccacaatagtgtggtcccaggtactccttcttccaggctaactacacttccttccattttccataaagctcttttgcctcccctgcttaaaatctctcatagggttgttgtagtaattaactgacgtaatgtagataaaagccttacctggtacatggtcaagtgttcaatatgcttaccacccctggagcagcataaagagtatccagtgatccctgaaatatatggcccctgcagaatagtatatggcaaaacaatactcaagatgtaagtgggaagtgggaattgggaaggtgggacacagtatgatgccagaaattttgtttggaatcctcagaatgttaatttattttcttctcctccaaaatgtttgctgttgtacagaacattactgagaggtgctaagtcagttttgttctgttgaggaagtatgtgtgttttcgtttgtctgtgtctctgtgtatttaggatagctcttgtattttctatttggcaagcgcgggaggtggacagcttggtgtgtttttctgagtggtgttgggctggtcatcaggaagcccagatttccttgaggtgggaggcaataagctttccattacaaacatgttctgtgtgtccctacctctggtggacaatattgttgagaaaaacagaagtcgcaacccaacaaaaatccatctttttcccatagatgaggtggtttaagaattaaagagggcaggcaaggagtttgggggacatggttggttttgttttgactgcagaggctgatgacataagaaccagttagatgtagatggtgaaattggaaggacaacgtctgggggtcagagaatctggggcccatctgttagaattattcatggagagtttagtatactatatgctggagggtcttgagactcaacaaatgggaagtgagaatgcctgaaatggagaaggcatattttttcagctgcgtatctgacaacagtttgtgtgctgtggctgaagaaaaataagccaatggttattacaaaattgtgggggtttgcttagaattagcatagtaactctaagaagtagtcagtttgttgaagtccttacacggagggtgatggaggaaatagagcttgtcagaagaactgtttccttgcattttatgatattactttgtcagtattttatagtatggagatcaaatagaacctgtattgcagagccttacatactgggatgctctgggcaaaagcatcttggaatggtggtaggcactggaggtcggatctaagagcacctctctctcaggtaccctcatctgtattctaactgctgcatgccaagaatcttcccttggtttagtagaaagtgttctagacccaaaagcagagggcgtgatccccgcactgtgccttacacgtagtcaggactcaataaatatttgataaggcaagaaggagggggaaaaagcaagatgacttactagatccattgatcagaatttgcctcctctagttataataactgtatggacatagataagttgcttcacttgtctcagcttcagttttctgctttgtaaaatgacagtaattatattgactttataaaatgaattgttaagagatttcaaaaatatataagcaaaatatctagaatgatacctggtctcttattgttatttttatctaaatctcatctccctctttacttattatctgcttggcaccctgggaatttttcgttggtaaaggtttagagaaggagaagtgggctggcagcaccatatcttatcagttttttcatccaggcatcataggccttcaatgttttaattttttaaagcagtttggatttttctgagctgctgtgaacttttgttaatataaaatagagaccatattgactttggaaacagtgaatatctatatatcttccctccctacctacatgtagctgtttagaaatgtgacttaatagtgatcaccacagagactatccttacagtgaaacatcctttgtaagcagatttctaattcatatgaatattaatatcaacaggagtgcattgtcccttagagacagacctcatcccctcctaaggggttcacagatagaattaagagattcatccatttggatgttaaataaactagatctttattttaattgatctctaattcaatcataaattaatgtaacaatccacagtgtacttttcatgccagcgatgtttgccatcaaagaaatcatggccattttcatctcacataacagttgttgaatgtcttgaaatatcgtgtatactcatcatgatttccaaatcatggaaggtatgagacctaccatactctttctttcttaatgcattaatctttctcaatgcattaataggaagcacatatattatcataaacttacatttgtaatattttggaaactatttttataataggtttcttttgtaatcttaaatgttttatttgtatgctttacaaagattctgtcttctccagactaccaatgcatttatggaacagaaactattaagatcttgtgccttagagttggttggaggaggaatggccctaacttacagccaactaaaaagattcccactacacagtctttagtgggaccaaattcaccttccactggcccactgatagtctgctgggctctatccaaataatcttaaattattagatatcattcctgcttgtaagggctttagagtaaaagattttatggttgctctgataattaatacttaaaatggtaaatacttgaaatgcttgtaatgagaatacttgaaatgagaaaacacttcctcttgcccttgctcatcagtggtcacagtgagctacctgtgatggctctgtgtttttaaaagactgacattaaattttttccatatgttcgtctaaataacctttccctggtaccactgggacattccatatatatggtcttgggccattgatagtagtctcatagtgctgacttatatcttctaagtcagtaggagtgaggatgctcccctcttcccctttttttgtataaacttgatcaaagccagctggaagtttgttcttcctctctatttgtaaatctgtatacttccttccccatggagcttaaggcttcctatgtaagagatactaaacacatagctacataaagaatacacaggacgttaccagtttttgctatgaaggaaaataccaggtactataagagaggataagaatcgagagtggtcaggggaggatctcttagaaggtggaatttcaggcaaaacctgaaggattaaaaaagagctttatgaaaagtgaagaaagaattttccccggcctaaggatcaccttgtaccaagggcacatttgtggaactgaaagaattggctcttgatgtacagtgtactgagttgaagggggaagaggtgaggttggagaataggaaggagccaggtcatgcagggccttgtagagtttgaatttaatgctaagtgtagtacagtagggaacctttgaaaggttttaagcaaagcaacaggggatttgatttacattttagaaagaagcctttggatgctatatattgagtaaatttaaggtcagacagcttgccagtcttaagagatgggacttgaacctgtggcttttcattcccagtccattctgatttaccagggtcttttttctagttgataagtaccaatccgaattaaatagaaaatgcaaaatagcaccaggccttttccaagtggcttccttatacttgctcaggttgacagtgaaaaataaaagccacctaaggctcatgtctctaacctgttgaacaactcaaaataattaagagatcacaactataccatttctcagttatataaaaaccccatctcttatctaacatatgctatttagtgtttaaggtttctcagagtcatacatgcactatcagctctgcctgttaagcagtagcttgtgtctgtgcgattttccaggtaaaccagcctgaactacccagctaatgtttgccagctttagccgttcagcagtttgtttttctttataagattaagtggtcagtttcaccttaggttttattccaattatgaaatcatttcgttttgttacacctctgcttaattgtacttatttacattgtatgtacaaactaataaatctgttattttgattgagaaacccctgcatgtttatatatttattctgcctctcaagaatactcagtaagttttttatctgttgattgctaattcatctagcatgtatttcttaatacggaagtactatatgtagtgttaaaggcaagcacacctaaatcaatcaaatcatgctgtgctcttgccaccttgagcatgttagttctgcatctataaaataggaataaaataacaaacccataaggtaattgtgaaaagtagtacaccatatgtgaaactgttttgtatgatgctcaatacattttcactgttttattaaaacagttttattgaagtataattgacatccaataaacttcacatgtttaacatgtgcagttagtagatttggacatgtatagacccatgaaatcacacaagcagactttttatctctccatttatctatttctatgctggttgcattggcaaactttcttaatcaaggcagtggtgttcggagaagggagtgtctaggttttaagacatatttaaaattatcattgcttctatattgatgtcacaatatttaattttttaaattaaatttggcagtaggttgggtttggtggctcatgcctgtaatcccaacactttgggaggccgaggtgggcagatcacctgaggtcaggagttcaagaccagcctggccaacatggtgaaaccccgtctctactactaataaaaaaatgagctgggcatggtgacgggtacctataatcccagctactctgaaggctgaggtgggagaatcgcttgaacctgggaggcagaggttgcagtgagccaagatcatgccactgcactccagcctgagcaacagagtgagattctgcctcaaaaaaaaaaaatggcattagaagaaaataagattttagaacttaacacacaaacatacagatcatcccagcctgtggcctgtgtgctacagataccaatcctgcagctctcagagaatgtgtgcctcaatgtgaaaagaactaggaatctctgctttaggatacagagatgaatcaggtatagatcttgccctcgaggatcttagaatctagggatggaggagctggaacgtacctataacaccgataatgcggagtggaaggtaggaagaggtaaaacaccggaggaggatttaagagggtgcagtaacttctagcttggggatgcacttcactgaggaaaaaaccatttattgcctcctgcacatgtgtctgtctgaggtaggtgtaggtgtatagagcaattcagacagatacagaccctgcccattaatcacttaaatcctaatgctgtgcatcaccgcttaatgggttgggcatctgcccagcttttttcctggaccacttccaacatttctgaggaaagagtgagtgtgaaggaccctgtggctagacaccagcccaagttatccggtggctagacacctaactgactcataggaatgggggaagccccctctgggttgcctgtgtggataataaggctctcattcacctccacatctaggtcagagaggggccgcctgggatgcacagcacattgatagattacttctgggcccacggggcctcattaccatcatatccatcatcttctgctagtaccaaataatggatgtaatttaatcagatgccaaaggagtcctcagcaggagaattggagaaaccttgcctgaaactgtgctatagtgttggaatgattataatgaaccagaatgatcttttgtggtgagactaaatgtatcatgcactatatgagttctgatttatttttaaaacattcttgctcccattggctccccttttaatagtttctgtagcctgtttattgttacagatgttacttttaaatgaggtcattgagctttcctttacttccaaaggcaatgtttgcctttttattaaggggttggcagggctgtctggagaacagtgctaatgtgagatcaaggttaaagcttcagaccccaggagactaggtggagaaaaagcctcttccatgtttacacacactcatgtcagccagatgtctcacaaagggcaagtttcctggcagagaggcgagaagacaggcattgtggtcacagactgccttgactctcatggccccttcttgcccactgtgaaacctcaggcatgtcaaaaacaagctccctgagcctgtttcctcagctgtcacttggagataataatttttattcctaggacttttgtgaggataaaacgtgttatagccccttggtatgcatgagggacctggggagggcaagggatgtaatagctaaaagtctaaggctttggaaatgctttaagtcctatgtgtagtatattttgcatatctttgttagaggaccgctgaccaaatctagcttgccagtgatttttgtaaataaacttgtattggcacacagcccattcattcatttacaaatgtctatgtctgccctctcaaagacagatttgggtcattatgacaaagaccttatggtctgcaaagccagaaatatttactatctggcccattacagaagttggtcgatcactgtaccagactgaaggaaagtttctatacagagatctggtcatttaaagcagtgagggataggggatgagtgggaattctaaagtgttcctgcagaaagtcaaatactgaatgttgtcacttataagtgggagctaaataatgtgtgcatttggacagaaagagtggaatgatagacactggggacttggaaaggtgagagggtgggaggcggagtgagggatgagaaattacctagtggggatgggcgtggtggttcacacctgtaatcccagcactttgggaggccaaggcaggcggatcacttgaagtcgggagttcaagaccagcctctccaacatggtgaaaccccatctctactaaaaatacaaaaattagctgggcatgttggcagatgcctgtaatcccagctacttgggcggctgaggcaggagaatcacttgaactcaggaggcagaggttgcagtgagccgagattgcaccactgcactccagcctgggtgatagagtgagactcagtctcagaaaaaaaaaaaaagaaaaagaaattacctaatgggtataatgtacgctattcatgtgatgattaccctaaaagctcagacttcatcactacacaatatatccacataacaaaactgcatttgtaccccctacatctataaaaataaaaaaaaattttttaaagtgttcctaaatgtctatggattttgctctattctgatttaaacacctgaaaccttagtgcatgttaaaagactggtttgttgaggtgagaattaaatgctatatgtgggagcattagcacaaagctgtcacatgcagatgccaggtagatgtttgctaagtcgagatgtttgctagagtcgagtctccattatgtttcatcagtccccacataggcataaccctgtttggctctgggcataagtttctgggagtgggcaggttgacagaggcatcaccatggggcacttttatggaatagtcacatgttgttccagtattttcttctatgtaagttattgttaacaattagcctaaaatgaggtttattgaccaatgtctttatctttgcctcatgctttgaaattgttccagtgacaggcggagccagcactaaagtcatacctgagtatgtacatgctagaaataaagacgaaactggcattttaacgccaaccacaaattttaatggctgtcacatgtgttaatttttggaaagcaatcaaaatatttgccatagatcaaaaagatagtcctcagataacatattgctactggcagaaagacctctgcaaagtaaatgaaacattaaaaatggtgatcctcactcggatggaaaacgggaaaggagttgaatatattgtcactccgcactctacatcatatgtagatggcaacagcaaatgctatgcacttatgtacactgtcctttaataagtcattgagaggaacttggcctctggcttcctgtcttgctaattgagcactctctgtagttaccctgctgtaaagctctcactcccctcctcttgcacattggtcatcttgggaggtgggtatgttttcaaggtacatacccaaatggcaaaagtccaccatactttgtagaaggcgcctagcataatgcctagagggtcacaggcattcactcagcacttgttcccaacaccatctcaatgacaacaggtagatctttgctatctttggatttccatagcccttctctgtacctcacgcaagctcttaatcagatactgtgataattaattgaaagtttagtgtgtatttccaatctccctcaattagtctttctcttgtaggtaaggatttagtattttttttttctccttacctccattccaaaaagccattccctgcctgtggtaggccaagaacaaatcatgaaaagttgatcaaagccaagcagacatcagaataatagtggatataaatacagtgaactagagacagcagagactggaagcaaggcctgtctgtctcagataaaatctcagggctgggcatggtggcttatgcctgtaatcctagtactttgagaggccaaggcagaaggatcacttgaggccacgaatttgaggccagcctgggcaacacagtgacaccctgtctctacaaaaataaaaaaaattagctgagtgtggcggtgcccacctatagtcttagctacacaggagactgaggcaggaggatcacttgagcccaggagatcaaggctgcagtgagctgtgattacaccactgcattcccacctgggcgacagagtgagaccctgtctcaaaaaaattttttaaataaaaaaatagaataggaattcagtcctgctaatataacaaaccttcagaacaggacagtcactgttctgagtgccaaggagacagagtagaccatcgtcttaccttcttggagttcatgatgctctagaggagaagaggcgggcacatgactgttgcacctgagttcacagggaaccatcacccccacaatatcctgcaaatctttgcagctcccatttcataatgtaattcctgatgctacatatggtataaaaacataataccgtaattagtccacccacttttatttgaggccgagggatttagtgagaaacacagagtcagaagagctatgttcaagacatgatcttaccacctactagctgtggatattcatttgtgtaggaactatttacactcactgtgcatgcatttttctaggctatacgggggacaaggccaaccaagttcttcattgcatggaccttaaaatgtaactgggggtggggagggagaagagaagaattaactggtattaaacaaatgatatttcagatggtgatagatgctatgaagaaaataaaatgtgtcagtgttataaagggccatttaatttctttgagcttcagtttcttcaatgcaatctgaagataagaacacatatcatgtattattttgtgcaacttaaatatcctgtgtgaaagctctttgtctacagtagaggtgaagatccatcatcattgttagagtcatatctcagcccttatagtcatataaacagatccttatttgatcacatgggtgtttaaagcttaatgtattttctggtcaaatacacctcatgcattccttcctttttaccttagctcggaatcttccccccactgaatttctttttgttccatttccatctgtataagtctgcttgtatatcaattattacaatagggcttgttttgtgctcgtctttgtatatcttgccaaatgtaaagcagtgaccagcacatagtaagtgtgtaataaatagctgagtcagaatggagcagaacaaaagatcctaagagctcagaaaagaggaaattctgattgcgggagagggtaagaaagacttcatggaggtcgtgggacaggattgcacacaacaaggtggttggcacttgggctgagggaatggcagacgcaggtcagtggtagggatgctgtgtagatgaagggaggcagtatagcatgatgtaaggaacacaggagtcagggcagccaggtttgaatcccagcttggccatttactgatgaggtctttgataaatcacttaagcatattttctcgactccaaagtagtgataacaataccacccacatcttggggttgctttatggatgacatgagataacataaggaagcctatattccagcactggcacagaggaatcattccataagtaacagctttactgaatgattatggcctgtctttttaagtaccatgtatgctgtttccttcattgcaaagtaaaggcaaggttaaggtcacaggtctagtccctctggtgatgaggcctattaacatcagcctattaacatcactgttttctacagttacagactgtaccccaagccaactagtgtgtgctagcccaacagggaccagctcagtgcagggagagattaatgcaaatgaatcatttgtactggaaaaacaatccaagacatataatgtcatggtacaatattaagagtaataacttcacttagctgaaacattgtattttctgttcttggggtgttttttaaggggcagaaagcaaatgtttcatagaaaatttacaatcttgtatctagtgggatttcttcatactagaagcagtttatgcaaaacagatgcctgaggagcagtgcctgcatgcacctgtggatttggtggttatatttcattttccttacacctctagttcttgcagacaacctgaaatccaaccctggaattaagtggcaatatttcagttcagaagaaggaattttcactgttttcccagcacacaagttccggtgtaagggcagctacgaacaccgcagtaggtatgttgacttgcatgctaaagtttttaattattgcttaagagtgatctacatgaaatataaaacttctcatttctactcatggctatgcctttaagctgtggattcagaaatttgtacttgttctgaaatgaattcaccatttagtatatgtggatgtgaaattccaggcaagggcaaattacaaaacccagagctttcctatagctatctaatatgccaaatataaaaaggtacttactcgtgaagtcaaattgtgtgaagcacctagagtgttttgagtttcagaattctttgttgaaatgtaaatgatggtaccttatctatagtgcagcccttgaacataactttataacatatctcagagtagtttgttatactcaacttccctttctatgatgacatgcttggccatactgcatgaaatttacatgcagattttaactattagaagttttgaggtgagcagaaagcattggattaaaaattactaacatcctgcttttctctcacagacatgacttgagattctaccatgtagccagaagggcaataatggtgagatactttgtatgacaagactcattaattatagaacccccccgaagcaaatatactttcctatttaatcctgacagtttcctgtttgcagtgttagatgtttgatgccaaaacatctggagctctagtgcagggcacccacttttcacaccattttctggagtctacacaattactttagcttcccttcatcttcactttaaattttatctagaatttttccccaaggaaaatacttcatctgtgcttttcctaagattttttttttttttttcctgagatggagttttgctcttgttgcccaggctggagtgcaatggcacgatctcagctctgcaaactctgcctcccgggttcaagcgattctcctgcctcagcctgccgagtacctgggattacaggcacccaccaccatgcctggctaatttttgtatttttagtagagacgaagttttgccatgttggccaggctagtctcgaactcctgacctcaggcctcccaaagtgctgggattacaggcatgagccaccgtgcccagtcgtcctaagatatttttattgtgtgtgtggtttcttcctttccctccccacacattctggtgaagacttgggtgtcttggagactggaccagaagccatgatcatggcttctcacgagaacaaaggccaccatgaaccatctaattctcatttgcttctaagaagagatgggctagatggcatgctgattttaacgaagcacctgtgaagaaaagtttaaaaaggaaagtgaaaccttgtcaaaatcagcattcacctacacaaggcaattcggaaagttttcatgtatctccaccctaaatctgcactaattagcccttgaacctcttttcccttggctaaatgatccacatttctctctgatagactgcgattcacatttcttgtcctaactgctttcctatgatgcctttccaagttctctacattctttggaagtatggaatggatttcaggacatagcaacacaagaaaggaagtggtagataccagtcattctatgaggactgccccccagtttgtacatttaacatcactatttatatatcccactaaagcagcgtttaacaacttaatgtgacaatgccaacacatatcccaagtttcatttatgtgaattgaattttaacaaaggaagtgtgtcattttaaagaaaatccacccatctagcttggagaatctaaaaagttaaatatttgacctacttgtcagtgttgagatgatcaaattttccttcttttctgtactctgtttcatttctgtagccacctctcctggattctttttattgcatttccctagtggctcaatggtatcgactcatgaaaatatagtggtactttagtaattactgcaggactttgggcttgagaacaactagtgtaaatttggccagattttgagtttttttggtactttgcctgcgtttcttaatttgtgcccaggcttttgtgattcagctggcatctaacatttcacaggaaaatctagtgttttaaggatgtcagtaaaggagagaattctcttgaggctgatttgctttcttaaactccttctaatttgttccagctttaaaactgtgaatagagacctcattaaacctcttctcacaaaccttcctgcactgcacattagcaaaaggctgctttgatgggaggcatttctcctttgtggctgcccccaaccccctttttttcaatgttggcaaacaaaaacctggcaagaagagtggctatcacagacttggacaaattttgatggcacagttttaaatgctcagataaggggccttttggtggctgacctatgtgaattgtttcagtccagaaaggaaaggggcctcttagcaggagcctttgtatgagaagagagaaaccaaacctgccattcaaagctgctcagcatgctcacgggttataggctgcctcacttctaaccaagccccactctgcaagtctgcagaggagaatccaaccctggtgatgggacctttttctccttggctggtctctcagcccaagggaccactacatccacatcctttagcaaaacaggtacactgggcaataccaagcagaggttgtgcatattttatatgaggattttaactactagaagttttaagctgtgcagaaagcattgggttaaagaacactaacatcctgcttttttctgaaaaaaaaaaaaaaaaaaaaaagagagaaaagcaggatgttagtgatgctgaaaaagccaacctctgaaagggtttgctcctgaaaaacttctcttgtctgctttgatctttaaaggcataaattacccatccctgttctacagacacaccttgttgtcttaagtattattttcaatgcaccaatatggtttctccttccatgtggatttctccatccttgtgccatccctgggagaacacagagaccaacatgcccatgcactgtagtgttcacagctgtgttaagttgaggccctttacctaaaccaagactgaccccagagagcttcttctccctccagacccatctacgtctctacagtccggccgcagtcaaagcacatagtagtgattctggaccacggggcttcagtcacagacactcagcttcagattgccaaggacgctgctcaggtcatcctcagcgccatcgatgaacatgacaaggtgaccatgacccttgtgacccctatggcatcaggttctccttgaatgccttttttaaagtactttattgttttgtgatatacagatcctccttgacttacaatggggttacatcctgataaatccatcataagttgaaaatgcatttaatacacctgagctacatcacagcttgggctagcctaccttaaacagtcggaacacctaggttagccctcagttatggaaaatcatctaacacaaagcctattttataacataataaagtgttggctatctcgtagaatttattgaatacagtacactgcagaatactatatcagcggttctcctttatgattgcatggctgactgggagctgcggctcgctgccattgtccagcaccatgagaaagtatcaggagcctgggaaaagatccaaaattgaaagtacagcttcactgcctgcctatcgctttctcaccatcataaagtcaaaccattgtatgtcagggaccatctgtatatttttttaaatccatctttaaaaggactttgggaaaagaaaagactttgggaaaagagtattattctaatatttgaggaagcagccacaaatccaaaaatccctttcgtaactaccaccaagcttagtcttatacttctttatggctcatggtaaggtttctaattagccatgactttcacactggaggttacgctgaggaggagaggggtgggagatttggatgctgatggatggctgaactttattgcaagattgttgggaagtcaggaagaagggaaagccgctagtggctgactaatctctgggacacctcagagagaggtgtgggtacagctaatgataatctattgcctgtggacattttctgcttcatcattttgactttgccaactccagaggttttgctcactaacctagtggcttaaaacacacacacctcactctcttaccctcacccctcacctccaggttgaaaaacaggatagttcattcttgctatgacttttctctgcataaaatagtttgtgtgtgtgtttaatgttatgtatgaacataatactaccacttcatgttggaacaaaaaccaaactctaggggtttccccactttaccaatccttatggatccttttcaaatttgatagatggatggctccagggatttattttgaaactctcagaatctgttctgtaggccttcttactccttggcctcttctgttacataaataaataaatctttagacggtaggataacaagtttggtggttttttttttttttctttcctgcagatttctgtgttaactgtggcagataccgtccggacttgctcactagaccagtgctataagaccttcttgtctccagccaccagtgagacaaaaaggaaaatgtccacctttgttagcagcgtgaagtcttcagacagtcctacccagcacgcagtgggattccaaaaggcatttcagctgattcgaagtacaaacaataacacaaagttccaagcaagtgagtgcgttctctcagaggacttagaggcatagtagataaagatggcaataggaatatattgtaaattgatcacacaatgatgtttagagagattttatttatttatttatgtatgtatttatttatttatttatttaccttgagacagagtcttgctctgtccaagctggaatgcagtggtgtgatcatggctcactccagccttgacttcctgggctccagcaatctttctacttcagcctcccaagtagttgggaccacaggcttatgccaccacgcccagctaatttttatatttttggtaaagaaagggtttcactggctgagacctgtctgatctcaaactcttgaactcaagcaatccacctgcctttgcctcccgaagtactggaattacaagcatgagtcaccgcgaccagcgtagagggattaaaaaaaaattgattgggggcgaggtgcggtggctcacgcctataatcccagcactttgggaggtcaaggcaggcggatcacaaggtcgggagttcgagaccagcctggccaatatggtgaaaccccatctctactaaaaatacaaaaaaaattaggcaggcatggtggtggttgcctgtagtcccagctcctcgggaggctgaggcaggagaatcacttgaacccaggaggcagaggttgcagtaagccaagatcatgccactgcactccagcctgggtgacagagcaagactctgtctcaaaaaaaaaaaaaaaaaaaaaagatttgggataaaattgtcatatgttgtcttcgtcatcatctaattatagagtgttaactgcgtttttctcatcttttccaatcaaagatggtcagtctgtacaatttcttgactcttagagcctccccttcctgcccctttatttagatcatgtctgcacttatgtcccaagggaatctccacatcctttctaatgctgattgtcagctttgcttcctctttgacttggagtggaagtctgcttgtgcacatgtggacgtgaagtgggcagcaggaattcttgccttgatccttccttcttctaaccagctgtcatttagatgagcatggcccttcagatgtacaaaggcactctaatttaattttttttttttttttttttggagacagagtctcactttgtcacccagcctggagtgtgatcgcgcaatcccggctcactgcaacctccacctcccgggttcaagcgattctcctgcctcagcctcctgagtagctgggattacaggcatgtgccaccatgcctggctaatttttgtattttaagtagagatggggtttcaccatgttggtcaggctgatcttgaactcctgaccttgtaatcccccacctcggcctcccaaagtgctggaattagaggtgtgagccaccacgcctggcctctaatttaatttttatgtattaaagaaaatctggaattaggatgcatcctaaagtaagggaaaagatatttgaaatggggctcatgctttgaaactacttgaaggaatctatttcattttcccttttattttcaaaaatctgtttataggctgggcgcggtggctcatgcctgtaatcccagccctttgggaggctgaggtgggtggatcacaaggtcatgagatcaagaccagcctgaccaacatggtgaaacctcatctccactaaaaatacaaaaatatagctggacatggtggcacacgcctgtaatcccagctactcaggaggctgaggcaggagaattgcttgaacccgggaagtggaggttgcagtgagccaagattgcgccactgtactccagcctggtgacggagcgagactcagtctcaaaaaaaaaaaaaaatctgtttatagtttttttctttgtttgaaaatattaatgtatcctattgagataaatttaaagaatacatttccaagcccttcattgtgtctgtgtttaaactaagcactgattaatgcaaagcatagtgcctcgcacataatggatcctcaaaagaaggaagctactgtaattataactaatgatggtacatggtgtgttagttttatgtctcagcataacaaattaccacaaacttagcagtttagcacaatatacatttgttatctcacagtttttgtgggtcaggagtccaagtacagcttagctgagtcctctgtttagggtctcacaggctactgtcagagtgtcagtgggactaccgttcattcagagtcctaaggttcatgctaaggtttgttcatgctaaggttcattcatgctaaggttcaacaaacatgagctcacacgtttgttggcagagttcatttccttgcaactgtaaaactcatttcatttacttcttcaaggccaatagaagagcatctcttcaaatccctggcttcagagaaggtttgggccctcttttaacaagctcatctgattagatcagccccactttcccttttgatttatttaatcagattactctcgcttgtgattaactcaatgtaagtttatcagggacctcggcaaacatccatccatctttgcaagcaccatcacaggagtaatggctcattacttgccatattcttcttcttagaagcaagttacaggttatgtcccgtatacaggacatcctgtatattcagcagtatacaggatgttgctcatttagatcatcttagaatttggcctaccagctttggcaagcatcagctatccacaagccaatattatggggtggctgagcgtaaagttgcccttggttcagtaaggtcagttaacaaggctgaattcaagtactcaaggcagattggcctgtttgtcaatgccacccacctgtcagcattcctcactagaagtgttctttctaccaaattcttctgtcatcagaccatctttaaagtctagttttgattattatacttttcaaataatggagagaaatgttagactagcagttgcaaactcagatgtccacagtggccaggcagcgcatttgagtcaagtgagctgggggaaggtaatgaggatgagttggagaacatggtcacatggacacatgcaccatccagagggtagctgctcctctgttcagtccattgagcaggaatgtctgcccagtgctgccagatcttctgtttcaagagatgccagaaatctggattttcatgtgaaatcccttgattttcaaatgttgacatttgttccagctttaaaactgtgaatagagacctcattaaatctcttctcacagacattcctgcactgcacatgagcaggaggctggtttgatgagaggcatttctcctctggatttttctgtgttgtttttcttaatgttggcaaacaaaaacatggcaagaagattgaccattaaagacttggacaaattttgaaggcacagttttctaaatactcagaggagccctttttagcccaagtaagatgtttctaaggcttagctcactggcctctagtttatagcttttactgacagtttagagaaaaaataacctagattagtttgtataaagaaaagacttcaggaatgagcgttgtccagtttattaaggagcagtcccagggtactctcaggcaatattgcccaggagttatgcaggttatagatttcaactagtgttctactctgaaatttttctaaccttgtggatttgtctatattgttttattttctccagacctggattcctcacctgtaaatggaggggtgataatatccaggattccatcataaatatccaatgcatatttcctgtgattattatgatattcagtttcctataagacttctagctccagctaaactagatcagatgccctagatgtcctaagttgacctcaggcccaaagatggccaaggcctaggcaacagtgtagcaaggggtctgtatacacttcctagaagtttattctagtgtaaactctatacatcactatttctcttcactctacagacaattatttaatgtctactgtatatctggtgctgttttaggtgccacatgtgaggttattcaaataataagacctactcttgacgattgttgtaagggttagtctgtacatgaaagtaaagtgtatgcccacattggtagccatataaaaataagctacatgtcataaatcattgttggttgacactaatttgccttatatcaaccagaaggtctaaaacttttgtccaattctgacccttttttcagtcttatggtagatctttaactgacagcattaacatcctggagttgtttcttctgaatttgttttggagctgattagttgaggatcataatgaacctcaattaaagatggttaagagtggagatctaatggtatgggcaaagcctaaatatgagtcgctcttccccttttgatgttgaccccaagacatgcctggtggcttatagagagactcagcaaatggagagctattacattttcttccagttacatgctgcatctctgctctaccccaagtccctgtaattgcttgcccctaaaattgctctaagtgggtgactaaaaagggaatatcccaatgcattaaaaaaacaaatcaaaccaaatttgacagatctgataagaatggaaaaataactcaatttttcttgaggataaggtgggaatggagtcaggggttggacagagccagcgaggattcttacagagtgtatgtcttattgttggaatggaaagaaaatgtgcttggctaccaaagcagctcaagggctgctagctttctggccttccagacatggacctttgccctagaaacagctctaaatgacagtgtattttatgcagaatcataaggctaagtgagacaacttagagactagggttctcttttaggtcaccctagatgtgtccaggaatttatcacacatatacttttgccatgaggagatggtttgtgtcataccatagatcctcctcatgctgtatctatgtatatatgttccctccaactagggactcaagcaatttttgtttttgtatttttcagtctgaagtttaaatgaactgtttagggtccttataaaataatttactgaactgtatatacaactgaaaaaatattgacatctggtttgttgacatctaatttaagacaagaatattcctaaagtgtggattttctttttgcatcagcattcacttcctaatctctgataactaaatagtgaaatttaaatgtgcagttaatgttcactagagaatgttcaggtatcaaaattggtattaagtattaggagtaaataagaggaattttgaatgcatttatttcttagagtcaaattttgttaaactcagttcagttatctatgacattcatatattataagttaactgttaaattctgcctaataaagaatacttaaatctaaaatggaaatgtataatttgaaggaaattcaagttttgtgtcttcaccattaggataattttttaaagggtagctatattcattaactattgctgtgtaacaaattattccaacactctgtggcttaatacatctttattgtctcatagtttctgtacttcaggaatctggacacagcatagctgggtgcctctggcccaacgagtttcttgagacggcagtcagcctattgcccagagctgctgtcttctcaaagttctactggggaaatagctgcttccaagctcactcacacttttgctggcaggatcttcagttccaggggcctctgttccttgcctctccataggactgcttacagcctgccagctggctttcttcagagtgagaaagccccccttgcagaagccacagtctttttgtaacctagtctttgtcttgatgtcccatcacctctgccgcattctagtcattataagtgactcactaaatccagccacactcaagggaggcagctaccccaggaggtgaatgaatgtcaagacatggaatcactaagggaccaagtttgaggttgcctgccgcagtcactttagagcaacctcaactaaaacacaataacagaaacctgaagaagtaagtgtataacatattatataaatatttctcagtaaaaagataaatatgtaggatgtcctaaaaatttttattgaggccaggcgtggtggctcacgcctgtaatcccagcattttgggaggccaaggcgggcagatcatttgaggtcaggagttcaagaccagcctggccaacatggtgaaaccccatctctactaaaaatacaaaaaattagccaggcataatggcacgtgcctgtagtcccactacagtaatctgaggcatgagaatcgcttgaaccctggaggaggagattgcagtaagctgagatcatactactgcactccagcctgggtaacagagcaagactcagtcttaaaatatatatatatacagacacacacacacacacacacacacacacacacacacacactctcaacattatatatatatatatatatatatatgttaaatcaaagaattacagattaggaagaagatgtaaaagtccagctctctgacttccctctttttattgtggtcatttagcctctgcttatttatctctaattgtaggaaattaatcacctttgtttttttttagtcaacccacttgacagaagttctacgggaccaaaattaactctcagttattctacctcgcagccctatttggaaaataatttcacttctaactcaggggtgctccttcaatccaatggcatggtttttgttttcattttgtgtgtgtgttgtagtttcttttttttctcttttaccttctttttttatcacctttttgctgatagtctttacgtaaaataaccaattattcttcacagcaacactactaagtcagtcctgtcattactcccattttatagacaaagaaaattagttgtagagaggttgagaaatttgcctcaattacccagacacagcttgtaagtagcagagctgggctttgaacacagttacctggcttctaagtccatgtttcactgctctactgatgagatttttaaatgaaaattacctaaagatatttagtctaggagcaaataacattatgtgcctgaagagcccgaaagagtcatcattttaaagcctggtcctcaagaaacgagcattcatggtgatgttcctgcatcacagaggaaaggataagtcgcgttctgcatcatctgtttcagaaggcaggagagatttccatttggattggcttaaattactataaccattggtgcctaaaggaaatcgcctcctttcatctgataaatatattaggaacatctccttacctgatgctgcataaatgtggcctcattgtccagaaagggtggaatggaagaaaggcagaagcagggggatgaaagccacagcatcaaacaggagggactaggaaccgtgggctaggcaagtcctcgaggtggggaagtccaaggacatgaacaggaaactgaactgctgcctttagctggaatccaaagagagcattcaattgatgtgtttttgtttagatacagacatggtcatcatttacctgtcagctggcattacatcaaaggactcttcggaagaagataaaaaagcgactctccaagtcatcaatgaagaaaatagctttctaaacaactctgtaatgattctcacctatgccctcatgaacggtaggtagagtttcaagatattcctttcagatcaaagatccctctaagtgtatgctgctttaaaaagaagaaaaagaatcataacagtgtgcttggatgaaggctacgggaaaaggcaaccaggcggctctttctctacctgatgttggtatttagggtgtgtaaggaggttcctttctcttcatctgtctctccagtgaactgcttgtttctaaacctcttctccacttacgtggtcttgcagaggattttatacagcgtccccctgccccaccttttttttcagttctccttcatattctaggattatctaaggttttagcttatctcattggtttaagctgcaggaagccaaagcactgacctagattcttctgcacaacccaatctgtgaatatcacattttcctgcagaatcaccacctgaagcctcttctgccactttctccacctcagcttccttagctgtaaaatggagataagcattatctaccttgcagtgttgttgtgaggattagccttaatgtacagtaaacaacttattaaaatggattgtgctgctgtcgaatgacagaatgtaaaagggtttagtaaattggtaaattcaagctactactacattttttcccttctgctattcaacctgtccgctagtctgagtgcagcacagttttctagctgtattgtatctctccgcctgttaatacattgcttttctcccatgacatctttaggcccattgccctcagtattcaaagtggccatcttctcttgtgtttaagaggccgtgtcttggctggacacggtgattcacgcctgtaatcccaacactttgtgaggtctcggtgggctgatcacgaggtcaagagatcaagacctggccaacaatgtgaaacctcgtctctactaaaaatacaaaaattagctgggcgtggtggtgtgcgcctgtagtcccagctactcgggaggttgaggcaggagaatcgcttgaacccaggaggcagaggttgcagtgagctgagattgcagcactgcaccccagcctggtgacagagcaagactctgtctaaaaaaaaaaaaaaaaaaaaaaaaaaaaaaaaaaagccatgtcttgatcaagcagtctttcccacctactatcttttgtttctcttgtcaactgtgaaatttccatgcagaaccatgtggttcagggacagtgggcctcatattctgatgtgctaagggttccttggggaatggctttaaaatgcagatttccaggcattgctctcagattcttattcagatcctcttaggaggggttcaggaatctactttttggccagggtgattctcttccaaatgatttctagaccacacttgagagaacacaggttctgatgtctagtggtccttagctgctgtccacatttgctagtcgtttggcttatggcaagttacttaatctctttagactgcagttttagctgtgaaatgaaaaatagtaaaatctactgcatagggttgttgtaataataaataagcaatatatgattgtgtttaaagttcttaatgtagtacctggtaaagaaagtgtcctcaaagaccgagctcggtggctcatgcctgtaatcccagcactttgggaggccaaggcgggcggatcacgaggtcaggagatcaagaccatcctggctaacacggtgaaaccccatctctgctaaaaatacaaaaaaaattagccaggcgtggtggcgggcacctgtagtcccagctactcgggaagctgaggcaggagaaaggctagaacccgggaggcggagcttgcagtgagccgagattgcaccactgcactccagcctgggcgacagagcaagactccaaaagaatggtcctcaaagccagcataaggagtttatgaaagcttatatggtttcctgtctcagacagtatagctcagaggtggagctctgccatccagggccagatctctgtccagtcctctttgtcccctggcactttctgcctaattctgacaagcatgtctcccattatactatagtaaggtgctcacatactgtcctctctctcttctccctccactttccacaagaatgtgaacttctcaagcatgaactatgtcttagttttctttgcattctgagcgcttagcacaggactgaaagcagctgaagtgggtgagggtgcctgggcacgtgcccatcagtgttatctctgaccacctgttgctcttttctcctttgtgttggattctttcattcatgagaggtaggaagggtgggagaaaaggaggaagggaggaaaataaaatttactgaccacctaccatgtacaacacagggtactgaggtttcagagctgtattatacaaagttcctgtctgcaagatgcttatgacccagtgaggaagataggtagacatggaagatgaatgaaattcaatagtagaggagtaaggaggcccaaaaggaagggatcacttctcttccattagatttgaaggtctgcctgggcagatacttctttacttccttgctgtcacccattccttcactggtcctaaattcttcaaccagagtctcttacacactttctgttacagtaattccgtactttagagtctctagttacttccatctcagcatctttttctcttctctttcttcctttaatctaaccagacacacatcctcactgccagttttctctctctttctcagaaccctatttctaagtgtaattcactagagtagacacaattaaccttacttacaaatagggaaacagattgactaagagaactggaataaagaatttgttgtcggctaaaaattaaaacacttggaccaggctcagtggcttacgcctgtaatcccagcactttgggatgccgaggcaggcggatcacctgaggtcaggagttcgagaccagcctgaccagcgtggtgaaaccccatctctactaaaatacagaaattagccaagtgtggtgacccatgcctgtattcctagctattcaggaggctgaggcacaagaatcgcttgatcctgggaggcagagtttgcagtgagccaagatggcaccactgcactacagcctgggcaatagagtgatactctgtctcaaaaaataaaataaataaaacacttgaactacaggagataagagactggaaagggtaccagagaagttggggggattgggaatggttgatgggtaatcattggtaatggttacattctatctaacaaaaatatagttagatagaaggaataagatctagtatttgataatataacggtgactgtagtcaatagtaatttattatatattttaaaataactaatacagtggaagtttgatgtttctaatagtacaaagaaatcataaatgattggggtgattcatacctcgattactctgctgtgattattacacattgcacaactgtatcaaaacatcgcatgtacaccataaatatatacacctgctatgtacccataaaaattaaatttaaaaaagagtttattgtcagaattagaatgcacacaattgtgggagaaactgggagaaactgtgggagaaaaaaaaataaaagacccaagatggggaggtgacatctcagaaagtttagtaaccaggttggggcctgctgggaagtctagaagctaggaacatggaagattacttaggagacctggtgtagaagtccatggaaggttgttggctttttgtggctgccagcccccgtgcatgctcagtgaagcatctggaacatggctggggttgctatcagtgagcaggtcagcagctgggaaagggagctgaacacagagaagagtaggacaaactggagcattctggcccctcagtgtctgtctctgaccacttcttactgtcccctaaatctcgcagtacagccctcactttttgcacctttaacctggtagcatacaagaaaagaggatcctgggaaatgtagtttctagcatgaccatgttgataataggcaacccagcgtacttaccaatcagccaccctactgaccttcctgccatccctacataacatctcatgatggagtaacacctcatactcaatcctccataaccttccatcccacgctactcttctttgcctagtagatattgttttcttttatgttttgagagactcaagcaatacatgacaaagaagggaaatttagttattgctcgagttttcttcttttattgttttacttctgtgagcttctcaaggatataaggtcaggtaccaatcgtgtctttggtgttaacttttactctggagtgtacccctcactccccatctcagctctgtgccgtgcaaagggaacagtaatctgattctgacttaatttggcccaggtattttttgctttcctttagcattgcatgagtggagcaaaagtcaagtttatttaaatataatgtgttttaagaaagaaatgatttgccaggcatggtggctgacacctgtaatcccagcagtttgggagacaaggtgggcagatcacttgaggccaggagttcgaggccagcctggccaacatggtgaaaccccgtctttaccaaaaatacaaaaaaaaaatagccaggcatggtggtgtatgcctgtaatcccagctacccgggagactgaggcatgagaatcgcttgaacccaggaggtggaggttgcagtgagccaagattgcaccactgcattccagcctgggtgacagagggaaactgtctcaaaaaaaggtggggggtgggagaaagaaattaatatttattttattctgccatgattttagaagtggacttccagtgctacaagtatgtacactctctatgtagaaatgctaaagacatatgtggtagatgaaccatgaaagcttcagattctttttaatgattgaatagttcatggtttggtattgaaatctgcaagaacatgagacaaaaccttttaaaaaggcagtggtagaatctcagtagtgactgaaatcattttgaatttgtttacaacagtccccatatgcaatcagtttctaatccttttgactatgttccaacaatagcaaactaaaaaaaaaaaaaaaagtgtattaaatttacttttgtgctataaattacagatgttgtagaataatacatcccagtatgcctaaattttgtacaaagtttcaaaaccctctaaatgtaaaaaaatttgtattaagtaaatcaagttcagtattatcctaacaatatcaagcatgaatatgtttataattaaaatgagcttaaagaaacagggtttggaggcatcagtaaatgcaatccataattctttcatttagttgcatggcagctagactttggcaagtggttttataggtgaagaagtaaggaatgaaaggatcaccctctgttctttaaaactcttacagtttcatctactacattaaattaaatgcagacgtgttgattattacttttgcttttaaatattaaatgcagaaaatgaattttcattttataattaacttttggggagaacacattcttactgaatgggactcctttatttgctcatttgtttttcattatcgccctgtgaagagtccctttcccctcttgactatttcaggaaagactatgcctcaggctttgtttcctcagcaggaactggtatttgtgtccagagtctatgtggtctctgcaaaaacccctttggtattacaagacctcatccatgcccgtatttgatctaaatggcaagaggttgaatggatataaaccattttgctttccgtggtcttctctcggctttccattttagatggggtgactggtttgaaagagctggcttttctgagggatctagctgaacagaattcagggaagtacggtgtgccagaccggatggccttgcctgtgattaagggcagcatgatggtgctgaatcagttgagcaacctggagaccacagtgggcaggttctacacaaaccttcccaaccggatgattgatgaagccgtcttcagcctgcccttctctgatgagatgggagatggtgagtttggataaacgtcattttaaaggaaggggaaaagaactgggcagatagaaatggcacctctttctcaggatcatagggtttcttagcacccctgccacctgtcctatatctctgtattgtacagcagaaatccccagcccaggttcttccttattaccctggccatagtacacataatggatgtatcctctggggaggctttgtgaggattctcgaatatccaaaagtttgtgaattagaactaaagggtagctttgtatcatggcacatgggaaatgaagctcagaagtgctgaggattcagcctcagagacaaggcaacgtggcatcatcgcacaaacatgggcctggcctcaggtgggctttcaaattccattcttccacttgaggtgttgtccttggtaagttatttaatggtgttaattctccatttggtcacctgtaaaatgggatagtaaatctttcagattattaggattaactagataacatatatgacctgtcattatctagttaatctaggattacctagatattataaaatctatgataacacatgaccggcataccattcagttataattactgtttttatttcatttattaaatgtattttacctttgttgttatcattgttattattactaacatcagcatcaccgtcatcctgatgcctaagttacccataacaggatgttgagtaaagtactgaaccttcacaggattcaatttcctgacctataaaatagaatctggaaaatataacagaaaatacaacattttcctcaaggcagttgtgaagattaaatgcaataataataaaacatctagaacaatgcctgactaacagtatatttttagtaaaagcacaatctttttcttttcctcctccatgttcttacttttccttttctctatatcctcccctttctccttccttgacagaagaaaattgaagaagtagctaattattagccagacagacaccattgccatttgagatattatatttatgttttgttagctaggaactcttacaaatacggattttttttaaaactcacgtgtaaaaagtaacaagcctatagagaaggtgttttctagaaactaggtagacattctctttctataaggaagaaataagccaactgccattatgtctcaatttttatttttaaagagacagggcctgtctcaccccggccggagtgcagtggtgtgatcatagttcactgcagcctcgacctcctggcctcaagcagtcctcccacctttgcctcctaaagtgcagttgtgggccaccatccccagccttgctttttttaatcactcctattactgtcagggactacagatgtatatagaatggaaactcccacttttagataaggttatttccctttttagtgaaaatatgaagtcctgaatgcaagttaccttttatgcatgtagcttacattactgagtgccagccaagcattgtgccaggcagtgatgagtgaggctcacctcctaccctcagtaagcgtaagtctgataagagaaagacaaatcagtaattcccgttaatactgtgtgaaagggacaaaggatgacgtagagatccagtttttcacaaactcagatcatatagccaaattctcttactgatagtggtatcaggtagagtggaactccctcctaaatccagagagctaccctgaatgctttaaaccaaatcacatgtagaactttggccacctgttgcctgataccatccaaattttgctccttggggcctgtgttatgaatcctgtgcagtggatttcagtgattggtttgcagatctattgaattcctctactagagtgtgtctgtcttttcatctttgtgttttcagtccctagaattattgagtgccacatcctctgactccatgacatgaggcttgattctagggaaacccatgtttatgtggctctaattcaaaacctacacagattaaaatatcagttactgaacatatttctttttaaaaagtaaatctatgtgctttaggttaaagtacagagagtgattgaggattttgtcaatataacaggagcttagcatactttatttgccataatgggatcaagagtcttctgtcccagttgataattgaaaagtaagattgtgtttcttttttaagactttgttctcaacctgtccagaggagaatagaaatttgaagcgagcaggcatctcagtcacagagtatttctgttgtactttactgatctatgaaaatggctttaatcctagactaaagctcaggggactgtggtgggcagattgtgacctctgtctccatgctggtcctcacagcctgctcctgccgcttacaacctatttatcctgggagacctgggaaaaaccttctccaaaatgcatttctaaaacctccttaaatacatgttatttttaaacattttaaaacagatagcattctaaatgtgaactgcttaaaaaatgcttttgagaccaaaatagagacccgttgcatgacttttcagatgctttttcagtgatgtatccacttcttcctatcaagtgatgcatttagttggcctatgcaaccatagcaactcaataatacctcaagtggacatcatatgcaattctctgtgtagaagctcattctttgtagaagccttcaggagttttaaatccctttcctgggggtttctagaagaatggctttctgataggctgatagacatcaagcgcaggaaaaaacaaaatcaagataaagataaacaatccatctttttgtttagagttttctttagagccataggattgtgaaattgttggggatcgtaaagatcattttatctcacctccccccgcccccaaccccagccatctgatgcatggagagtctcattccaagacgtggcacaacttaccaaacccagcagggaagccaggaggagaaaccaggtgtctcgatctcggggccatgcattgacccacctctctttctacattttcctcctgtgtgctttgccctttccctaattatcctattgttgttgttgtttttaatggcctgttacctaagtacggtctttatattttgaaaaggttattttttataaaaaaacaacaacaaaaattatgcactagagactgtgtagcccacaaagcctgaaatatttcctgtctgaccccttacataaaaatttaggaactcctggcccgaatgactggaaatacattcctttggaaacttaatttctccttcagctgcttgaagttctgtatgttcagatactgtacctttctaaattttttccccttgttttcacctttttttaaaggatgcattaatggggtatagtaataataccttttaagcattcctttatccatagtctcttttgatctaacatttcctagaaatcagtaaagcagttaatgctgtgtcctttaaacagatgtgtgagccagacacagtggctcatccccatagtcccagctacttgagagactgaggagggaggatcacttgagcccaggcagttgaggccaccatgagctatgatcgcaccactgcattccaacctgggtgacagagtgagacctcatctcgaaatattaaaattaaaaaaattaacagatgtgtgaaccaaggctcagagtagttatatccattgtcacctgtacaatacaaaaggggtacagctggactattaagtacagtttttagattcattgtccattgatctttcaagttcagctgaatctaactgcttcacaaaatagaaaaatgtatttagtgttgctgatgttttgcactgatctggaaggtcttatctttttaggtgaaaaagtagtggaaaacatagaaattgcctccttttaaattaactgcgctatctgagctgccaaaggacgctctttccctcccactctaactcatttattaggctgtctgcaaaggcaatgcttgattactggaccacatgggaaacttttcttccaaacaaaattgagacagctgatagaagccttcatgattcaccggagcacagttccagtctttgtccaattccttctctgctggtctttagatttattttgtttttaacccataggtttgataatgactgtgagtaaaccctgttattttggaaacctacttctgggaattgtaggtgtggacgtgaatctggcttacattcttgaagacgtgacgtattaccaagactctttggcttcctatacttttctcatagacgacaaaggtaatctgctaaatgttcatcctaagaatacttttttagaaacctaaagaaaataaggtatagatattctacaaacaaaataggaaaatgatagtgtaaagaagagcattgtgactaagattgctcatttgtagtagaacaccgtaaagatggcagagtggatctccaaattacacatgtgtttctctgttctttgaggggtagggaacggttatttgtaacatcaggaaattagactggaggattgaatgacacatagaatgtcatcctttgacctgaacagataacttttctaaagaagaaataatgcagccaacaagcctatgaaaacaatcgcagtatccctgatcattagagaaatgcaaatccaaaccacaatgagatgccatcctacacctgtcagaatgcctattattaaaaagtcaaaaaatagcagatgctggcaaggttgcagagaaaagggtacacttgaatactcttagtgggaatgtaaattaggtcagccattgtggaaagcagtgtgatgattcctcaaagagatgaaaacagaactaccatttgacccagcaatcccattactgggtgtatatatgtacccaaaggaatgtcaatcgttctctcataaagacacctgtatgttcattgcagtgctattcacaatagccaagacatggaatcaccctaaatgcccctcagtggtagactggataaagaaaatgtggtacatatggaatactatgcagccataaataaagaatgagatcatgtcctttgcagaaacacagatggagctggaggccattatccttagcaaactaactcaggaacagatactgcatgttctcacttataagtgggagctaaatgatgagaacacatggacacaaagaggaggacaacagatactgaggctacctaagggtggaaagcgggacgagggagaggagcagaaaaaataactattgggtgctatgcttagtacctgggtcacaaaataatctgtacaacaaacccccgtgacacaagcttacctatataataaacctgcacatgtacccctgaagttaaaagaagttaaaaaaaaaaaaaaaaaaaaaagaagaatgtcatcctttggatcttttttttattaaattgttatcttagatttattggcattaagatttatgtggtagattagaatgttttataaaacaacaaaacaaccaatacctccaaaatactcttgatgagacagatgtttgataatttaagacatctttctacgcctcaagagttttatgtaagcacatataaaacaggttcagtttttactggactggtgagttgcagaatgagaagttgagtatcgggcagccagcccagagtaccccatatttcaaaacagtgattcagaacttcctacaacatgtttcttattaacatgcattttgttttcttattgcaggatatacacttatgcacccatctcttaccaggccatatttattgtcagagcccccacttcatactgacatcatacattatgaaaatattccaaaatttgaattagttcggcaaaatatcctaaggtaaggaaaaggtgagggtcataggattgtttttccctgagaatgggacccatcaaagccacatacgagtatttactacagagtataaaacaagtgtataaattattttaatgttatcaaaagtattctcagtaatgtttccgtaagaatagcacccaagattttgcttactttgtatcacagataaggtgtcttagaactattatttgacgataatgtcttgtaaatcaaattttatgttcacattgactttcattgtaaaatcagatatatttcatctcattttcaaaaaaagttccaatgataccaaattgaaaaatgttggcaaaataaaaggctaagttgaggaccagctttgttgcatttgccaaaaaatagcctggcaaagtagcgtccattccaagttgacagcacaatcttatacattgttttttcttcaaataaaaaacagattggatcttttccaactgtgatacattattttggcagatggtaacctgtagaggaatgggtctttgtgctcattggttgaaaattaatgactgagtgatttgagacaagttagtctctggaaagaattagagttggggagcaaggatggagagtaagggatgtttttaatgcagagctgacataatgcttttacgcaattgaaaatctcacattatcctttcaaaactgatgagcttctttggtattcgaaatcaggaggtggccattgactcaacagcttcttccttgcctttaattaagtgcttaattttatcttttgcctgaaatatttaattctgtttgccaacacagcctccctctgggcagccagattatcgcagtccctgtgaactcatccctgtcttggcacataaacaagctgagagaaactggaaaggaagcctacaatgttagctatgcctggaagatggtgagtgagaggaagttgtgtttgcttgaagagctacagggtacagtgctcttcttcatgttggaattctcagccagggggtggcacttgggtctgataatttgtctcgtaatgtgactaatcagtttttaaagtgattgggaaagaagacattccacaggtgttgtataattatttttccttttttgtttataaaactgataattgttcatgatgaattcatcaaaccatataaaaggatgtaaagtagaaagtaaactatgcccagcctggacaacataacaaaatcccatctctataaaaaaatgtaaaaattagccagacgtggtgacacatgcttgtattcccagctactcaggaggctgaggtgggaggattgcttaagcctgagaggttgaagctgcagtgagccatgctagcaccaaaactatctacttccttccttcctttgacttttcattccccataagtagccacttaaatcaatttccagaaaatgtgtatatacaggcaggtatatatatttgtgtgtgtgtgtatacgctcacccacggctttaatggctatataggattgcattgtgtagataacccaaatttctttaaacagtcccctattaatgcacatttagattacatccagttggtttttttcagttcaactcagattgtggaggttgggagtttaaaaggagacatgaaagcataagtaccttccgacattctctaaggaaaagaaaattttagattagaaattggattattcatgttcaacacaagcagatggatagtttggccataacttgtggcacccatttctgctttctcttaccagattctttcagacaccaggcttcaaagaatcatagagaaagcgtatctaacacacactgttcatgttacctgtgtttctcttctctcctcttccttcccaatgtagcatagcagtgctgttgaaggaccctaaatactataactgaccaaaaggggagtagagttttacttttatcatcaaattttaatcgctgaacataaaatgcagtcatacatgagatttttcttggatggacaaatcagatgtttaacctgttgactccaaatagatccatttaatcatccctttacaaactacttattgaacattttctgtgtactaagaaggataaagaagattgacactctctctgccttcatagagcatcgagcctagtggtggatgcagacaaacagcaactcgatacagtgtctgtgcctgtatcagttggatcaggaaagataggaattgggagtagccagaatgcctttaggcaggagtctcttccaaccttcttgtttggttcttaaaatatcattatggcaatagcaattactaaaatgcaaatgaagcaaacaaattaataaatgaaactatttgagaaacttatgtttacaagcctaattctactggtagtttgttgtttggtaatacacatttgaggaaggtcaaagcctattttgaaattctcttagctgacttattttcagatttttctttagaatgatagcaccatctgcccttatatttatatcatttttaaagataaattatttaattttcatatcagaaagggtgagccggccaccaaaattctcaattagaaaacagacttttgtgtttgaaattagagattgtttacctccaacatattctgattgaaagcaactcagttacatcctgggaaaatatctgcatggttgctggcattaaaagggaaagaaggaaatgtaggcatttgtctgaccttcttgatacagtaaagagcctcaatgttagtggggtttttttcaacgatgctagtaaattctggttattcttcttaggcaaattcgaggtagtaatcaggtagtcacttcaggtagcagtgttagctttctctgagttctaaaattgttgagcagatccctgtaagtgaaaacttaaggagataataaataatgagattggagacttaaaaaaaaaaaggctaggctggttacccagtaataagggcaaatatttttaagatctctttagttactttgttggggaggagggtagatacttatcttgtcctaaaaaataaaatggtttcttctaatataatccaaatagagttagcttatcctaaggacaattgcctaaactgcttagcactcatagatatagcagatattgagggattatttcactgaattaatttaaatataacttgagagattatgttagcagcattaagagattactccatcactgtgtaacccaagtgcattttttagcactttaggaggctgtttgctctgatagaagtactgactattagaaggtattcacatgttcccatgttacacaggcctgcttcacttcaaaacatggatcccatgttataatcagtgaaaaaaacccactcccaacccatagagagcccttctagaaatagagttccttttaatgtagagactatttttttcagctaagaacatgacagaaagacctatattgaaatctgctttcctaagaactgtttataaagtgctacttttagaagcttacggtaactttatttttctcttacagaatagacccaattataaaattattttctagtcattctggtagggttttgtcttttggttccttggaacacacaacataggaaaacaaacttaaaagatgactgtgagattgaaaagagagaaaatagtaaatgccacttcagagcaccttgtcaatttataatttggggaatggaggaaaaggattaaatttgttaatctaattgaatatctttgccagcagtacttgaaagcaattccaggaagatgcaaattgcttctgtgtttaagagtctacaaccatcctcacaaatcctaaatttcacttaactctaacctgcctagttaaaattttatccttcatcttttacttttatttcactaagtaagtcacatgagctgctttataaggcaccgttctttagttctgatttcgctagtcatcaacttcttcatttatttataaaccatctttaaataggttcagtctttcttctaataggataataatcgagaaatttcttttacttttaagtctttctcaagtggctagaactaggtagattggcttttgattctgtggtggacattgtccccactaaattttgttgaagcatccatttctaggcacaaagtgaatctgaaaatactactgtttctacatatgagcttaataagttagacttaagctatggcatacttgcctaccatggtctgcaatgacaaatcaggctgactctgcagggatgccataggatttgtgtttttcatgagtttaagtagtgatgttggtcatttccaaccaggagaagagaaagcattcgttggaatagaatgaatgaactggattctgtattggctgctcctcagtcctttcttttaaagtgagaattcactactggcttgaaaaatagtcaattctcagaacacttattgcaaaaccaattatgtatttttaagtgcatttcaaatccaaatagaaataagtgttatattattatgtcctgttctagcttgtgctcattaacccacattagcaaaaaaagactagggtcacagtttcaaagggactcctttcttatcctttcgttagccccatgattttctgttacatacttcaggtctcctcaacaagaaaagaaaacagaaaatacaaaattagataccttctatcaccctatcctcatgtcttcattcattcatcccatatttaatgaataccttccacgtgaagatagaaggtagaggcagtagaaaataatgtatgcaaagtccctgtccccatggaaccctcattttctaggtcagaaattctttattgatttttacaggtacaagacacttcctttattctgtgtattgtggtgatacaaccagaaatacctgtgaaacaactgaagaacctcaacactgttcccagcagcaagctgctgtaccaccggctggatctccttggccagcccagtgcttgcctccacttcaaacagctggcaaccctaggtaaagcccttacacttccttcacattcttactcttagcagctcactgtaaatatccttttgaataccatccaccccacccctccaaaaaagatactgaatgcctgcagagtcagctggtttggggatacaaatatgaaaacgatttgaagcctggcctcaaatcagatcgtctagcagactctgagacaaggtttcgtgtgctcgcgatttatataggatgggctttgagaaaccagtgaagaagtgagaaaaacaggacaaggaaggcaaaaaagacaagtttgatgttgagtgaagttttaagttcagcctggtcttctagggggtctctggagtgtaaattacaccaatagagtttgcccagactctaaagagagctcaactttcacatttcttagtcactttcaactttcttctagtgctaggtacagagttttcagtagccctaagtccatagagagaggcacagatacagcccattaaaggtaaacatgtaagtatggggatattgaggtggggtggggtagaataacagtaaaaggcctccaaaggaatctatgtagcatatcagcagtaatctaccacagattcctatcttcaaaagggcttaggaattcgaagataattcaaaggaagcaaaaaggaatttacatttattacgtaccagatgttttttatttttcacctgagttgacatgtgattgatttgggtttaccaaagataattttcccccagataacataaaatatagcaaagctgagatttgacccatgcacctctgctctgccatgtgccagacacatactaggcattcgtggtctatgttgtcaccaaaccacagtatactgacagtacagtaaaacaggtattctctttttcactgttgaaaagacttagggttcaaagcagttaataacgaagaatcatcacacaactggccaactgagaagaaggggaacagatgggaataaaatcaaggctagaagtctgcagtctctagattccaaatgatagcactcgtgtttgtgttcctctcttaaattccatcctcgagagttctgcctggacatgagatcagaagagcaggctggactaagtggtctcttctgggatacctcccagcagtgttgacaatttggatagagccagtgatgttgatccaagaaggcaggattttatatttctttgttttgatttggtctttggggttttgtttgtttttatacaaaaaagtatgtttaaaaatttcatatttttaagaaatgctttactgaaacactgatgtgtagaagcctcttttaagttctgtgtgagcaagctactgctggtgaaaattaggtcactgttttgaaatttgagacaataaattacaatagttttcttgatgaaaaagaagctcaagcctagattttttatttcctttgcatatctcccatagctacagtttccaatatggcagccactagccacgtgtagctattgggcactttaaatatggctcatccaaattgaggtgtatggtaagtgtgaagttcatacttaatttttatattgataacatgttaaaattataatgctattgtggatatactggattccataagcatattataaaaattactttaatactactttttgctttgcttttttttttttatttatttttactttgacagggagttttgctcttgtcacccagaatggagtacagtggcacgatcttggctcactgccacctccgtctcctgggttcaggtgattcttctgcctcagctgcctgattagctgggattacagttgcgcaccaccacgcccggctaatttttgtatttttagtaaagatggagtttcaccatgttggccaggctggtcttgactcctgacctcaggtgatcctcccgccttggcctcccaaagtgctgggattacaggcgccactgtgcccagccactttttgcttttcttaatgtggctactggaaaattttaaattacatctgtggatcgcattgcatttcagttggacagcaagcactgcctcatagagattattcagataatgtatgaacttaattatttcatatatgattaacaagcagaccataggccagtgtctgactttcactgggaggtcttggcacccttcctcaccttgatggtaaggccccaggacaaggtggagaggtaatcaagggcatcttagttaggatcagttggcaatgaaaatgaaccaaggtaattaaaatacaataaaaagggaataggaaatatgggaagcaatggcaaagaagtggtttccatttgatttcagtgatgtgggggtttagaggccaggtcttaaatatatgtcacctgtgttcaagtgagctgatagaaggacatcatctttcttggtacacaaagagacaaagaaaaaatttttaagagtgcatcatctaaggcaattaaatatgtatatgtgtgtataaataagcatgtctacctcctagacacaaagctttgggtcctgtatcttgattccttctgtctctttgtgctcaccccatcttactgcactagccttttctaaaacgccagtctctgtcactacaaaagagaccccaagccacctcttcttctctttactccagccccgtggtgactcttctgtctctgaagtgggtgcctttgacacttcttatattattgtgttattcttacactgttatttttctctattttccttattccttgtcactccaatcagatcctaacttctttgagttcaggaactaccctctctctttttggcaggtccttgcatggagggcctgcaaaagaatatatacatgaatccacagcatgctgctaggcaccctaaccttttccagcctctggttgtctttgctttggttaattaatataataataatctcccagggtagccaatgaagatatcatcagaattaaatgaaacataacattatttaatgttttctgggaatggcagactaggtaattctaacccaacctactgaggacaactatttaataaaattcctggattgaaacgtaatcctggattaaaatcttggaaagcatcagagctaacatgagagagaggaattactgggcaaaaatctcagagaaaataagaacccagagaagagagccaacactcaaagccacttttgcaatgcacatgtctaccaatccagaagaaacagctgtgaaattaaacagtgctttaagtagctacttcaggcaaggaagagaagcaaaaatcaaatccagggtccacaaaaggtgaagactctaataaattttttactcccagccccacatacatacatgcttttggcagagattctaaaagactacatctttaggggaaggcctgaagttaaatcaggccttgacttggggttcctatcatctgagtggtttggggaacttcaagcattagcctttgaaataggattagttgaagtcatgcagtgcttaggtcagtatcctggctcctaattgggaactgtttccaacaccccacctgctacatcttgcagtgtggcaccggacaggatgaaacaacaatcctctctggagaaggatcccccatcttcttaggcctcaagctatttctacagattactttttaagtgcaatgtccagcacaatcagagatcaccaggctaccaggagacaagacatgacgtgtgagaactaacaaaaggagtagaagatgccctatgtgattaaatgagataggacacatgatcatgctttctaaagcttttaaaaatactataaggttgaatggtagaaaatctcaaagacgaagatttagtgtttttgttctgcactgtgattcactgtgagaatttttatcttaaatagagaactaggattttcctgttagatcagaccaataatgaaacatgtatacattaattactatatttctagaagcttttgtttgtgtcaagttttgctgccaccatctgagtgaataatttttatttgatttttgcattgatttcactgttccatctttctttcttaaatagtactactaatatgaataatagttaatactcatttgctttacaaatattaactcattgaattctcaccgtatttctgtaagattgctgctatgcaaatgagagaaacactacatgtattataacctgcccaacatcacacagccagaaaatggctttaatccagactggtttcatgtgtgtcataagctgtcccctcattcctcataagatattatatgtagatctcagatagtttgaagaatttctactcccagcacttgtgtttattggcgcatgtctttactggttcattcttaggactgtaagctccctgaagggagagaatgtggccctttagatattaagccgccgccgggcgcagtggctcatgcctgtaatcccagcactttgggaggacgagacaggtggatcacgaggtcaggagatcgagaccatcctggctaacacggtgaaaccctgtccctactaaaaatacaaaaataagccgggcgtggtggcggttgcctgtagtcccagctactggggaggctgaggcaggagaatggcaggaacccaggaggcggagtttgcagtgatccgaagccgcgccacttcacaccagcctgggccacagagcgagactccatctgaaaaaaaaaaaaaaagaaaaaaaggaaaaaaaaagacattaagccaccatagctgacagattggcagagcccgagtgatgcctttgtttgggatgagatagagtctccgcattctcaggcctgctttgtttgcttctctttcagaaagtcccaccatcatgctgtctgctggcagcttttcctccccctatgagcacctcagccagccagagacaaagcgcatggtagagcactacaccgcctatctcagcgacaacacccgcctcattgctaacccgggcctcaaagtaagcattggcgcagagctccatttctggtgtccccctccacaggcccagcagggggtgctggcagtgaacctttgaagtaggaaacccagctctgcatctgtgcctctcagctggagagctgcagagtgtgtggcccaggggaggctggtcagcagtgactcttctgatggatgaagaagccccgtgggccacatggagaatctgttacaggccttagaagcactgggggtttccagtgatgttagagggatgtgatttagagactagtgaaactttcccagccctgtcttacccagaggaagaagtaaagtgcccctgctgtctctcgagataaatataagtataaagtttaaggaacaaagctttagggttagtgtgtatatatgtgtatattaatgactcgctataggatttttcttcttaaactcagaaagcctaggtagggtgaacaattgagtgatcacgcatctgctgactgtatttctgcaagcttttattttcaccaagtttggttgcatccatctgctgtggaaagatttttaaaaagtaattcggcttggcttctctgcaacagagctttgggaacactgccagcagcccactctcttttcatgtgagttttaaaggatccctgctatgtcttcctttgtttcccagttctctgtcagaaatgaagtaatggctaccagccacgtcacagatgaatggatgacacaaatggaaatgagtagcctgaacacttacattgtccgccgttacatagcaacacccaatggcgtcctcagaatttatcctggttccctcatggacaaagcatttgatcccactaggagacaatggtgagttttaggggcttccgttatcaaaggttctcccccaaatcctggagagacatggtaagtacatacaataaagcaacttcagggcattaaactaaagaagatactttcatggtggtgaaaaatgttcctgaatagttttttcagtgcagcattaacaacagctttgtggggttttttctatctaaaatgtttttatctcattgaaattttgagcctgaaattctttatgcttggcaattttaattcctagtggtttgtttgattcctaccttatgcaaaatgtgtccctactggatagacttcattttactacacatgattatggaatcaagttacagcttatgtatgacctgtgaaaaatgaacacacaaattcaaaaacattcttttacttctaggctttttttttactttaattttcaaaagcaagagctaacaatgtgctatagcatagcaggggagtcaactggacataagaacagaaaatctacctagcctctaaaacatctctacctgtaaccctagcactttgggaggccaaggcaggtggattgctcgagcctaggagttcaagaccagcctgggtaacatagtgaaaccccatctctacaaaaaaaaaaatacaaaaattagttgggtgtggtggtacacacctgtagtcccagctactcaggaggctgaggtgggagaattgcttacgcctaggagtttgaggcttcagtgagccaagatcacaccactgcactccagcctgggcgatagaatgagaccctgtcaaaaaacaaaacaaaaaaacaaaaaaaacaactatactacatatcttagtaaatgcccagatatatactgagttcaatgtctctttttaaagtaagaaggaatttcagattctctttactacttgtgttgatgctacagtcagatacaaaagatgagaatccttttgcatttcagtgtaacacaaacaaaattcatcctaaatatttttagacttataagctcacttttctttgaaatttacagagtagaggtgcatacttaaaaataacatgacttggccgggtgcggtgactcacacttgtaatctcagcactttgggaggctgaggtgggcggatcacgaggtcaggagatcgagaccacggtgaaaccccgtctctactaaaaatacaaaaaattagctaggcatgatggcgggtgcctgtagtcccagctacttggagaggctgaggcaggagaatggcgtgaacccaggaggcggagcttgcagtgagctgagatcgcaccactgcactccagcctgggcgacagagcaagactccatctcaaaaaaaataaataaaaaataaaataacatgactttctttggtctccattaggtatctccatgcagtagctaatccagggttgatttctttgactggtccttacttagatgttggaggagctggttatgttgtgacaatcagtcacacaattcattcatccaggtaatattttaactaactttatagtcatttcttaaatatatcaaggatattttggaaatctgaatagaagagtacgcgcaccaaggcttagaggcagaagcatgacctttaaagtgaggccagctgggatttgaacatcttctctttctgtcaccttcaattccgtagctttctcctgccgtctataaaatgggaatgatacctacctcacatggttgtcatgtaaactgagtcagtgaaaggctgttagccctgttcttggcagccatgatgatgtttatgaaaaagaaaagatgttggagtctaaagagcagtttgaagaaatatccactttaaactgatgaaagaaatatcaataggagcctgacaattatgattgccagagagtgtttcccaagaaaaggaggattgttaatgaagaaaaacggggtgggttcattggctcacacttgtaatcccagcaccttgagaggctgagatgggcggatcacttgagaccaggagttccggaccagcctgagcaacatagcgagaccctggctctacaaaaataaaataattaatcaggcatgatggggcacacttgtattcctagtaactcaggaggctgaggcaggaggctagcaccctgggagtttgaggctgcactctagcctgggtgacagcgtgagatcctgtctcaaaaaaaaaaaaaaaaaaaaaaaacgagaaagaaaaagtaccaagatatcaaacttactgcctcttgtatttgagtctaactctttagaattaaataagttgtttgtttggttttcttctttaaaaaaaaattgtccttgaaactatctcttgaaaaattaaaaggctttttgaaaattgattttcccagaatgctatatcaatatcactggaaatatatttagagtgctttatgcttcctgcttttaaggtttcaatatttaagctacagatgtcagggaaatgtttggtggggaggcaagtcacacacattgttttaatcccttcattatacaaatagctattttttcctagcaaccaagaaagatcatattttgactggtacctgtaatgatgccttaacatttataggaggcagattttcttgcttaagtttatgcttttcactggtgctcattgtgtgtcaaatgattgacattcagtaaaattcctcttaacggaagttcattgggagcaagaattgggaggccataggtgtggaatttcaatatcatggcctatgtctcgtggaaaacggggccctgcagccagccaaatgttgactcctttgtagggtatggtatctgtctgaatctgtcagcttctcccatcatataagatttcatatgcaaacaagtaaacacttacttagaacacatccctcagtgttctcattaacagaccatgtgtgaagcacactcctactgatgtctaaatagagtgacttgtcatgcctcccatatattctaatgggttgagaaaaagtaaacaaagactgtttcttttgaggggaagcagtcaccttggtctttgattacaatgaaatgggccagaactgggctgttaaagatgttgttatagtgcagggaatcaaaacccaggtgtgccttagtcattaggtgacccaactgactcctctcacctggcagcttatcatcaagagccatttgcttttctgtctagacatattctttttgttcaagagggcaagggtaggggcagatgtttatgcttgtgtatgtacgtttacatgtttttgttgggattcaaatgggtggaagaattttgatttggtttgtttacaaatatttatcgtgttggtccaagtgaatcacaatggaaatatgatggactttcaagttacaaaaacccaggttcaggccgggcacagtggctcatgcctgtaatcccagcacattgggaggccaaggcaggcggatcatgaggtcagaagttcaagaccagactgaccaacatggtgaaaccccgtctgtactaaaaatacaaaaattagctgggcatggaggcgcatgcctgtaatcccagctactcaggaggctgaggcaagagaatcgcttgaacccgggaggcgaaggttgcagtgagccgagatcgtaccactgcactccagcctgggcgacagagcaagactgcatctcaaaaaaaaaaaaaaagaaaaagaaaaaaagaaaaacccaggttcagccaaatgcagtggcacatgcctataatcccaactactctggaggctgaggcacaagactcacttgaacccgggaggcggaggttgcagtgagccaagaatgtgccactgcactccagcctgggcaacagagtgaggctctgtctcaaaaaaaaagagaaaactccagattcaaatccctcatttggttacttttacatcatgggttgaacctacacaagtttaactagaatataataagagcaagaaatggcagttgaagtcctgggttctgcctcctgagtcactcagtgagtgtatattccccagaataagtgctcttgccctgtgcaatatgaaatcccacgcacctggtcgtttgaatattttgcttagcagagtgtgattttactatttagagctgtgtatttttcaatcaacagagtttaaaatgcaagtcaactacctcttatggtgctcagagtaactatgactttgatggatgcacggatagataggctttgcaaaggtatttttttcaaatgattactgatgattttggccttgggtgccagcttgagaacttcatccctcctaacacatggttctactcccaaaaagtagatttgccatttactgtttgcatgactataaacaaactccttttcacctttgtttccccacttaggaaagtgagatattagagcctatctcaaatgattatttttaaagattaaattaaataatatgtgtcagtctcctagaacagtgcctggtatctggtaagggctcaataaatgttaagcacttttataataatgttttgtgacctcgctgacttcatatgtaaaacagaggctgtaatacctgcattgaactgataggatgagaattagagatgatgcatgcatgtcaagtgcttagtactgtacttaagaggtcgagtcccaaataaatggcagttatttttatcatgctatttttgttttaaagttctgacattttagcaggtcagaagagaaagcttaagctaatcttcagcttgtcatgaagcagtcccatgaactcagttttcagtggtttggctgagaattagaggcattttctaattcaacactcacttatcagttactcatagtaagctttcttgtgattctttcatacacatttttagtgccctgagaatctgggtttgcattctttggagaagggtggtgctgctagagatgaagtacaatcattgagtaaaggactggttagatgtgtctttggctgtgaaaatctcacggaagtattgcaaacagcctggtctgttgtacttagaaatataggtttggtgtgatttttttttttccagtatcattctttatgagttgctatggtaacagtgtacccatctgaaatgcaggtgaaaatatgaatcctagatttatgtaggcaatatacgtgctgttgctttagcatgtttatcattttgaagcagatggcagttatacaagagaagtttagaaataaaattaccttataccaaaacacctaagtgctatttttcaccgaggtagctgtagggttgtagaaagagccaggtgtgggtactggtctaatctatcttatgtgtttttgcccttctcagcctaatcttctatttataaaatgggaactatgattcctttatggctttttcacagatagttaaatagtgtaaagttgcttggaaacgcttgaatgctctgcagatctaagaaggcagtacaacttcatggtatatgctttggagttgaagacactaagtttaaagccctgcttccaccagcccattgttgtgtgtctgtagtcccagctacttgagactggggcaggaggatcacttgagcccccaggagcttgaatctagcctgggcaacatagcaagaccccatctcttacaaaaatgataaatacatttctgcttctactagttattcactatgtgaccttggccaaataactaatttccccaagctttagttttctggaaattataatgccttttaagattgctatgagaaataattaaggtttttgtgattaaagaaattaggcaggtgggtgatgctaaataataggctcttagaaagtcctatgttgggtaaactgcaaattctcagccacaagagtatggggagttcgttggtcaagtagcacatgccctcccagttacccatgagcatagattaaaaacagccaaggttccaagtgagaagtccacacttctgacacacctagcaatttcttgaagtgcgttttctctgaaagagtaataagtttattgtcaactcatgcctgagggctcaacttcactgtttagttttctttagcttagcttctatttttttaggtgttcactgtaaatacaccatctcatttaatcccaataacagccttataaagtaggtactattattgaatccattttcaggtgagaaaactgaaacttagaaaggtgaaacagcattccataagccacatatatagaaagcaacagggccaagatttgacttcagatctgctgattccagagccaaacaagttagcaccgtgttttactgcccaattttctcttccttggctgttgagagtagcagggtggaatggagaaagcactggcctatggaccaggagagtcttgttctagaatatgagctgtgctctgagtagagtcaaccttaatgttgtgggaaaaaaactggactagacattgttcctcctaagttttgtatgaccttagccactcagttaacctttgtgagatctcagttttcttatctaaaaaatgaagtaaataataagggtgttgctaagggggattttttttttatctagaggtttgttggaagtaactgtagtagtcatgcatccaacctcccacctgatgcctctgtgcccatatttttgtcagtcgagccactctctgaacgtcatatttcacagctgctcaggttttgggccactcttatttatacagtcctacattaagtcttaaatttttttctctcataaaatttccatgttgtgttaaatcagtcacttagttgatcatttttgtaggtgggaaaagtagggaggaacagtgggaaggtatttctaataccaaacaatgtccctgtgactgaacatagcttttatccttaaataagccatgcctattgttctcattgatctttttcacttaaagtacacagctgtcttctgggcacactgtggctgtgatgggcattgacttcacactcagatacttctacaaagttctgatggacctattacctgtctgtaaccaagatggtggcaacaaaataaggtaagtgctttggggatgctatttcctttctagctgcagtttaaaaatagatgtcaggtatctctagttgaatgggaaccgcatagttatggtcaggaatagaaatctaatttatggcctgggtgtcctattaagaaggtttttgttctttttctcttctttcgtttttctgagatgcatactgtttatgatttagacagactcagcacacaacaagaaaaataactgtagcatggaatgcaccaaaagctcttgtttccctggaagtcagtaattagaggcttcccatatctttggtactagaaagaccagagaggactcttgggtaggacttttgatgttaactttgtcattaaaccaaagtctttgtgacattttcagctgcttagactgttccttttacatttccccagaaagagaccatggaaccaaaagtctctgcctcctgaatttcaaaagaacttgtctgatcaaagcaagggcatacccttgatttaatgcaggctgcttttaaaaatagctttcttagttccacctcatggttcatgcttcgtgtcattggcccttatggggaaatgcagaattcctggcaaactgatatcactaatgtaaagtaaaataaagcaaaatatagtcttgattaaagcagttctagcttcatttattgtttctatcaaatatagatcaaatatagtagtccccctcttatctttggtctcgctttgtgagggttcagttacccatagcataatacaataagatatttttatagagacagaaagaccacattcacataacttttattactgttataattgttctattttattattagttaatgttgttaatctcttactgggcctaatttataaattaaactatcacaggtagatatatatagggaaaaacctgtatatgtaaggttcagtactatcatcactttcaggcatccattgggggtcttggaacatatcttccacagataagggagaaggactactgtatatttttatacatcccctgcgtgttgttattttgtgtatatttatcattgaaagaagaaattatatgctttacttcaaatctgtcagtagaaatactcaagtctacttcctttaggatctgcttgcctggaaaaaaagaacaaacttcccattcatacatctttgcaaaaggtctgagtccatcttactcggactgggtgagcgcattctgtatacactatgtaggtgaccacagagtcaggtgtaactcttaccttaacctctactctaggtgacccgcaacctcaaaaatcatgtacctgtctacctgcctgccagcttcccttcatttttccaatgagtatttattgagaacctgggataaatgcagtttgtttcagggctagcaagataaatgctctctgaatacgtttgaaaaaaaaaaaaacagctgatatgaatgaggggcataacttgttttggtacaggtgcttcataatggaggacaggggttatctggtggcgcacccgactctcatcgaccccaaaggacatgcacctgtggagcagcagcacatcacccacaaggtatttgtcacaaagctgagctgctcagttctccaacctcctgcagctcactacatggcatatgtcttctgttctctttggccttggtaggagcccctggtagcaaatgatatcctcaaccaccccaactttgtaaagaaaaacctgtgcaacagcttcagtgacagaacggtccagaggttttataaattcaacaccagccttgcggtaagttgatctgattccttaacactctcatttttccatcccattatggaacatgaattggaatcatggctagtgtctgaatattattcctacctgtttcatcgccttagaactatagaatgataggaggagacaggagcttagttccagttcccagtttgacaattgggagatataaagctcagagtagaaaagtaaaagttttaaggtctctcagttggtattttgttttggttttatttgtttaaagactttcccaatgtaagtcctttgaaatatctgctgaagttggttcccacagtcttgtataaatatatgtggcaccatgtgttcctctcttcctgtcttctagagatcactcgggctccttaaattcccaaggccaagttaggtcagttcttgatcatttgctctatgagatgggaactcttatgtaaatcatctgaaaataatgtctttttttagcttagagtactctgtatagtttgagttgctgcaaatttacctggttatggttaaagatcttaaggacattctcattaatttataaataatcctagttgggagaaagctaaaatggggaatgaaagaacattcaaaaagctatttacaggaagtaggttttttatttagaataggcatttatgtcagtcattaagtatgtaattaatttttaaaatgtactgggttaaattaaaaatcctaaactgagtctcaaaaactctattgcagaaagcaattatctggtggaaaagagtagtttaaaacatgaatatgttaatagaatggtgtgttcaaagcaagggaagtcattattaccctgttcagaccccataccattttgagaagcactgtttttaaaggagacattgacaaatgagactgccaagtaaggttgtcataggaaagtctgacttattctgtgtatcttctattatttatgcaatgatttctggagtcttcagcacacaatgccaggatactcaggtagatacttctcaaaaggcaaattcgaataatttattggcccaagttatccccaaatggaattagagcattcctgggtattggggctgtcaggactccaagcctatgttactgcttatgttctagaggtgggtgtcttccagacagttagaaattcatgtagacctctaaaaacccattgagtgctatgattctcagaactaagctaatcctcaccaagcatatatacagggtgaatggcatgaaacaagcttgaggtgaaataatttgcctagtgtatctgacacacatgcagaaaaatgattacatgcaactctacaataccactttggaatctttgattttctaatatgataaacaaaattggcaattcaagaaacttgctatcacattttcttgttatggaatgaagaaaagggatacttgttttagttggattatttaaatattctagaagcagaaatttgcctgttaggtttgatttttaaataattttattattataaaaggaaaaaggttcatcacccaaagaaaggggaatgcacaatttgtggttaactaggtttgcatgtgaataaattttaaactattccttccctgaaaattgtcttttattgcttcttgaagtattcattttcctggtatattgttatgtgttaagaaaaaacagattttaataacagttataaaagttacatttgtataagcacagataaaagaattcataatatatacacagctgttcaatgggagatatctctgattatgaataatttttattttctaaatttttaacagtgactatatattttttaacagtgacttttgtaatcagaaacattttattttaagctatttttcgtaggtagttgaagagttgttttcaccaaggtagggctgagtctttgcattgctgtctgtcatttctgataccttgattgttctgtagggggatttgacgaaccttgtgcatggcagccactgttccaaatacagattagcaaggatcccaggaaccaacgcgtttgttggcattgtcaacgaaacctgcgactctcttgccttctgtgcctgcagcatggtggaccgactctgtctcaactgtcaccggtaaaaatgcaatgggtcatattctgtgttcaccacactgtttaatatttcaactgatgtcaggcattttgaagtgcaaaataaacagaaagtgctggtgtgtgtcctgaagaaaagtcacagttacaaagccacttagagctgtgccgtttgcagcatccttgtccaaagaacaatggattaaggccatttatgtatttaacctttggctgtaacttcttttttactattcttttaaactagctcagagcttcattattttgcttccccagcacatgtacaacttacagtttgccattgaccttctgcatagtaactttctttttgcttttcagaatggaacaaaatgaatgtgaatgtccttgtgagtgccctctagaggtcaatgagtgcactggcaacctcaccaatgcagagaaccggtaaaataattaataataataataataataataataataataataataataataatacatatgtaatactgtgagtctcttatagatttgttttgagttagggcgtataaagatgattcattctaatgatagaactaactgttcagtgagccagaattcaagctccgtagtgccataaaatgatgcctgtttcaaggtttaaatttaactgctgtaaaagtattaagagtgtatgtgctacatacaaaaaaatgtgagaatgtttcaagcatttactaagtgtctaccatgtgttgagtacgttatgcacattaagtcacttagtgttctaattaaccctgtgataaatatgcaagtgttttttacacacgtatgatgtgttctacagcattatttatatcagtgacagattttaacaccaggaaaataaattgtaataaaccccttctctagaaattaagagtgtcatgtgtgtttgtattgtgtgtgtataattgtttgttgagacatggtctcactctgttgctcaggatggagtgcagtggcgcgatcatggctcactgcaacctctacctccaaagctcaagcaatcctcccacctttctacctccctcgtagctgggactgcaggcatgtgattcccaagcctgtctaaattttgttgctgtagtagtacttttcgtagagatgaggtttcatcatgttgcctaggttatttgtattacttctactgtatataaagataagtaaattgaagctcagagttgttaagtgattgatacaaggttacacactaagtggcaaagccaggattcaaacccaaatctgtctgactgctgttaaggaccaggagcatgagtttggaatgtgggcggtggtcgtcttaacctccagacttacctcctgcacagaaaccccagctgcgaggtccaccaggagccggtgacatacacagctattgaccctggcctgcaagatgctcttcaccagtgtgtcaacagcaggtgcagtcagaggctggaaagtgggtaagcagaatctagtaaagaattgaggttttccagctaatatttattattcctactcttcgtgttttaaaaaggtatgtcagtttttcagatctgaaactgatttccataagcctttacccaccagattaaatgttgtctcgttcccacttattacccgtatttagcgtgtgtaccatatgttagtagcctcatctgtgaatgggagtttttcttgaaataaaagacttgtgaggggccatggcatgaagcagcagggcaagggaggaggaacccctgaggtccagaagcagaacccagtggtcaaggctctaggtgtgatattttgaagctcatttattttcctttcttaggaaacacatctgcttcatgatagttttgagaactaaaaactacatgttccccgctctctccccactcctcaggtgggattaggagtttgggactagacattatggaaatagtggctgtggtagactaagtaaaggggagttggtttttagcttattgtagctgtagcttgccattttattaaacagtgtttagagggatagcttactctgctttgcgtgtgtattttagcaaaggaattgtggcatcaaactgattaatttgggatgttatacagtagccccaagtcaattaagtttgggaaatgctgacactgcatatattctcttgagacagtcacaatgcatgtaatacactaaaggctctgagaaattggcagtgaggaaacctgtggtgactggccaagtatttccaaacttattggacttttttttttatttttttaaatgaccccacacttgggggatgttaagccagagtctaacaaacattggggtcatttctgtttggtcttgtaagatgattttgaatagccccatgatgtgtggatgtcattatttaattcacagagagcagttttatttctctcctttccaagttgttaagaggcataaaacagttatttccctggcagtctattgctattctcattttataaggaaaggaaactaaagctcaagaaattcacagcactagtaagtaatggagatcctgagaactgtctgatgcccacacttaagtgctgtcccctgccccacactgctttatagaagactaagtattgtttttctggcagggactgttttggggtgctggattgtgaatggtgcatggtggacagtgatggaaagactcacctggacaaaccctactgtgccccccagaaagaatgcttcggggggattgtgggagccaaaagtccctacgttgatgacatgggagcaataggtatgtttgttagatgccccaacaatttgattcttgaatatacaatttcctgcctatatgctaggacatcttaaaataatcctcttcccaacttccctgattcctttgctggtagtctttagttacaaaaccaaggcagataattaccttcagaactggctaaatattctatgcagagagagtgagtggccatctgtgctgccaaattttacaagcctggaattcattcccataaagcttgttctgataaatataaggactggtttctgcatggccaaactctggagtctgtttggatatgcacgccagctgtcagaagcacagggccgtgtacggagtgaccactgtatgtctagtgcctgctaaaaccttcactcacaacttttgcaaggtagaagtcttatagctacaaatcagtatttggggccttggagtcaacagaagccagagctacccagtgcatctgggacagcttaggatgaagcacaaggacaccacagggtggacagcccctgggatcagtctccaagacctcaaaaatactgccaagattagattgcttacctgagattttttttttcagtctttccagaattagcaccaaggcctaattcttagatggcagtagagtcaaatatttaaatccttagttaataccttgatttttaacatcacttacatcagcctgtctagaagaaaagctcatatgtggggaaggattttgagcttgtatgttactgctgaactaggtgagggtacatatgtgaaagtgacttggctctgagaaatcactttctatgctcacctgcagtttcctatctggaaagcacaaatggccttttaaaggaaacccataagcttcgaaacttgatccggttagcgcatatttattggacctggtgccttttatttcagtggttactctgtactaggtgacttttcctctcttccaagagtaactcataccccagggagctaggactctgttggtgttggatgctgcctgtgtaagcaattcttctggtctgctcactcttcccagcagtccttgccatttgtgctcctgctctgcctagcaaccaacactggagaaccaggaattaaatgtagcctccgctcccacgttcccatgcgtcatgtttgaggaactcaaagcctaactaagcatctgtttatcttccgccaacccccttcccactgtattccctcccatctcaccatccttactttcttccccacttgggaaatcttaacaagaaacatcttcttgctctttcactgaaggtgatgaggtgatcacattaaacatgattaaaagcgcccctgtgggtcctgtggctggagggatcatgggatgcatcatggtcttggtcctggcggtgtatgcctaccgccaccagattcatcgccggagccatcagcatatgtctcctcttgctgcccaaggtgagctcaaaatgaaccccacaggggaggcagcagccaggctagaaggacagtggcgggttgtgtaagcctctaaggaactgtcagaacagtgctatactttcagcttctgtggagtcattttggaagttcccaaagcctgctttcttcttcagtgcctaaaccctacaagctctattttgatccccggaaaaatccctggatcctctccttaccagcattagcccccagtggcctgcctctgcaataagccagtcaggggagctgggatgctgagtgggaaattttgtttgttagatgtgctgcccttgcaattccaaaaagacaggcaaatcaaagataccccagatcactaatggcaagaatataatctgttcgattgcagctgccattatgtagtgtgaataaacacacatttgaataatcacatctcttaaaacaggataagtcggccaatcgcggtggctcatgcctgtaatcccagcactttgggaggccgaggtgggtggatcatttgaggtcaggagttcaagaccagcctggccaacatggtgaaaccccgcctctactaaaaatacaaaaactagccggtgcggtggcacctacccgtggtctgagctacttgggaggctgaggcaggagaatcgcttgaacccaggagatggaagctacagtgagccaagatcgcgccattgcattccattctgggcgaaagagtgagactccatctgaaaaaaaaaaaagtcatcgaagccaagtacaaaatgattcacctataatcatggcctcaataccacgtgcagtatctatactctgtttaagtgcagtatctgtactctgtttgcagggaacaaaactgtttaatggccatctccatccttcctaaaaccccagtccccggggatgtgttgacctgacctttttggaggtgaagttaactcatcttcctggccacttagctcactctaacagctgtaatgacaggttgatgttaaagcatttcactatggccacaagcctgaaggggaatcatggagtaatgttacctgatttagtaacagggataatcaccatgtgcttcccttggtgagattcagctagactgaggatgaccgtcatccagtgttagcttatgcctggccttttggaggcttttgttgcaccatttcaccaacacagtcagtcatttttcaatccctttccttctgtttcagtactttagtagaggattaaagatttgttggcctcaatcaacttcttttctcctcctttctcagaaatgaatttcagatgtctcttgattacttgttcttcttgtttggattcctgctccctcctcctttaaaaaaacatggggcatcagttcattcccttctaagatgggattcattcttgatggaatgctgtcacccagccatcaaacaagtgctcagcagggtattaaagcgggtgattttgtttgattaaatagtcatgtttctctctttttaatgatgggtagaaatgtcagtgcgtatgtccaacctggagaatgacagagatgaaagggacgacgacagccacgaagacagaggcatcagtgagtattcagctgccttgctgcagaatgtgtcagcaggaggctaatccagaataaatattctttcttatatccttttggcttgtattaaaatttaagaagctttgacacggtggctgggtttttttagttgtttttttccatccttttttgttaggagtacgtgtaggtctttgttttagagaatctcaaaagattttattgtgtttttttttttttttttttttttgcattaagtgtgttggcctaaaacagctcaccctttcctttgtttctcttgctcattattttccaaccatagtattttagaaaaggaagtttcaggtatgcattttttaaaaaatcccttaactagtatgtacaactcagggaggaaaaaagagcattttctttatcaaaagagatttccattagtgttaagacaccctggccttcagctactagaccatagcttcctgatgcacgttggagatatataattaaatacctctcactgcaccagttctaaaatcagcaccccaatccccagaattgtttaaaaaatgatttattctggctttccaaagagaattctcccagcatgtaaatgagccctctcagagcaaatgtgtttgaaacaatggagatactggcataagagtgacattaactgtccttggcttcctacagtcagcaacactcggtttatagctgcggtcatcgaacgacatgcacacagtccagaaagaaggcgccgctactggggtcgatcaggaacagaaagtgatcatggtaaggtctagcttcctgcatttgaagacccaaggaacctcatgtactcctgtgggatgatgctcacaccctattttgacatggttttccaaaaagacacaccccagcatgccactggtttataagagcccgaggacagttttacttatgtctcagcactcctctgggcacacagattgctttcaagtttttctccatacagaaggattcatattgtttaaatggagcctgcttgccatcccacttgcttttccataaaatcagcatcctcttaggtcccgctctccagtgttggctggcaaacagcaggatctttaagggctttttcagtcatgtccccttggggcatgacaagaatctgtgctgtcctccagcattctcttgccctgacctctggcatggtctggggagctcagagaaggcttcaccaaagaagcaagaagcaacatttgcactgagccttgagggggtgattaaagaaaaggtaggggcaaagaatattagaggccaaaggaccagtgtttacaaagtcatggagttgtgtaagtgcctgtaagatgctcaggaagggtcaaggccaaatcatgaagaggcgccgagtgctaggtaacttatgaaatccacctactctgccaaagacttggccatcccacatggcttctctccttctcagagtccatatcgctcattgttgcaaagaacagcagatgtatcccagtctataagcatcactgccacagttccacaaaaatataacagatgtgggtagtgtttttcctgccattgtaaaatctttttttttttttaagatagctgtttaattttccagaaatctgtattttcctcctagaatcaagtccttttttaaatacataaatagtgtatttaagcctttttgacttagctttttccacacctatcctggaaaaaaaaagtcctcaaaccttgtattccctgtatctacactaaaaaatgcaaaaatagatactcctcagagcaaccaacgtcaccatttacactacagccaggtcttcaaactccctttggcaaataagagcagctaaagctctgttttataaattggagactgttaatttgggctttgaatgacattattcccaccaactaaatagaaacttcaggtttctatggagaaccacagcagaacttaaatttctcagtttctttgacttttttgcttttttctctacaaacctttgaacttgcataaattcctgctgccaggcagttctgtgccttctcgtttgaataataaaacaggtttgaggctactaaagttcaacagaaataatttcttattcagcagaaatactgaatccttttctctctctgaaatactgaatcctttttctctctgttcctcaataggaattgcatcaataccaaattaggattctgagtgatgtttatgacgttccattagcctctcccattgtctcagtaaaatggcatatgaagcaacagcttagataaaaggaagggtgcagtgtcagtatctgaacactaaggcatccagctaagggcttggttcctttcatttttctccataattggatccatgttatccccaaggtatgaaaaatagtttctcatgcagacagaatgcaacaccaaaagaaggggaaggcattgacactccccatattccaaatgcatcataaaatcaatagaatttaaatgcgtgttggcatcctttgaaccagtacgtgggtcactaaaaatggtgacattgagttaatgtccctgtgatgcctagaggcaaagctacatacacccattaaacaaggaaatctaattgttttgttggcacacttcttgctcatctgtgtatgctctactctcctatttggtggatgtattggcatctgctatgcacagttatgcactgcataacaacacttcgcatatactacaggggtcccatgagattataatggagctgaaaaatttctattgcctagtgatatcttgatgatcctgaccctgtgtaggcctgggctaatgtgtgtgtttgtgtcttagtttttttgtgtgtgtgctttattttttgagacggagtctcgctcttgtcacccaggctggagtgcaaaggtgcgatctcagctcactgcacttcaaaactgtatcattccttacatatcaaggatctcatttgtggtaaaaattttttttggtattttatcgccatttagtcatattcgtggattttctttgttttttcttcttcttcttcttctttttttttttttttttttttggagacactgtgtcttagttttttaatgaaggagtttaaaaagtgaaatgtaaaaatttttaaactagaaaaaagcttatagaataaggatataacaaaaggaaatatttttgcacagctgtacaatgtgtctgtattttaacctgttattacaaaatagtcaaaaagttttaaaagtttaaaagtttataaagcaaaaaagttacagtaagcaaaggtttattattgaagaaagaaaaaagtttaataaatttagagtagcctaaatatatagtgtttataaagtctacagtagtgtacactgatgtcctaggccttcacattcactcaccagtcactcactggctcacacagaacaactaccaatcctgcaagctccatttatggtaagtgctctatataggtgtaccttttttgttttttgttttttgttttttgttttgagacagagttttgctcttgtcgcccaggctggagtgcaatggtgcgatctcggctcaccacaacctccacctcctgggttcaagcgattctcctgcttcagcctcccaagtaactgggattacaggcacatgccaccatgcccggctaattttgtatttttggaagagactgggtttttccatgttggtcaggctggtctcgaactcccaacctcaggtgatccgcccaccccagcctcgcaatgtgttgagattacaggcgtgagccactgcgcccggccacaggtgtaccattttaaaaaatcttttatacggtatttttctggtacctcttctatgtttagatatataaatacctatagtattacctacagtattgtgtacaattgtgttttagttgcctacagtattcagtgcagtaacatgtggcacaggtttgtagcctagaagaataggctatgccatatagccgaggtgtgtagtaggctgtatcatctaggtttgtgaaagtacactctgtgacatttgtgcaatgatgaaattacctaaggacacatttctcataatgtatctctgtcattacacaagacatgactgtacccttgtacactgtggaggtggagggggctacagatgggagttgttacttcctcaagacagcttggtgtagaggaagagcttaggagatagggtaaagccagttcactttgaagcctacttctcccccttttttttccacaagctgttgagaccttagtgagctaccttagacctgagtttcctaacacttaaggtaggattaaaaatttttactgcagtctgggcaatatggtgagaccctgtctctacaaaataaaaaaattagccaggcatggtggtacgtgcctgtagtcccagctactcgggagactgaggtgggaagatcacttgagcccaggaggtcaaggttgcagtgagccatgttagcaccactgcactctagccaagaactctttgagctctttgagacagggctgtctcaaaaaaaaaagaaaaaaaaaatgctgggtggagttgcaatgaggatgaaatgaaatgacatatgataggcacggtgctcagggttgacctccctacctctgtgcccaccctgccctgaagaaatttacagtctaggaggaagctataaatgaatgcatgtattcatatgcttgataaaaggtggaatatgacagcttccttaaaagagtaaaacaaagaaggaaaggggtgagagttcacttttatctgcgagtaaattatgggaaaccccatggaggaacatggcattgactggcccttgaactggtaggattgtggcgtcatgattctctgctccctgataagcgtatttccatgtgaatccttgagtgtgttacacaaaaggaaactcaaaagaattaagtctataaatacatgactacacaacggcctcggctctcatggtatgagttcagagttgtgatcctagaattgaatgaaaattgaatgttaccaaactaaacttagaaactttagggtgtatttttatttagaaatattttatgtggccaacagaatttcgtttttcaaaagaatctaattttaattgttgtatcttaagaaaaactactccaattgagaatgttttttgaaagtagaatcattttggcccatagtctaagaccacttagaatgattgattttcagcagtgttaccctcacaagtggaggttagaaacaattactacctgtgtgtgttttcaactatctatctgctttgcccatttctcttaaaaatatcatgttctgtccaatcatctattggcttatttttaagtcaaaaaacacctgtacgttatttgttccttgtgaatttgtattttggttactatctcatcagaaactttatgtaagtgtatattaggcaacatttttttctttgtagaggaagatttctccctagtttgtggcaaattccaaaatacttaaaaagcaaatgctgaaccttaaaaacctggtcaaaaaactttgtagatgaacgtaagaccattttctagaggtgcacaaacattctcctgcagttactctctgtggccacgagatggtgagtgagtccccagagggacgtcacaccccttataatcaaacaaagtttcttaggaactatcagataaatatataagcagactgtcaaagaacaaaaacctaatctcggctctttttgatagatgcctgacctcctttctaaagcccatttcccacttgagattgtatttgcagacactttgctacataagcctttggatagtaaataaatttttccttgaaagtgtttgcaaatatcctttgtgtttcaaatagtgcgtcttcctccatgagtcagggactatgtctgtcttaattcatcacccttcccagtgctcagcagaactgcctggcactgagtaaacaattaatttgttgaatacgaaaatgtgtttgtctttctcctgcttttccacaacttgctattcccttctcccctgacctcttcagatttccattaatgattgaaataagaggaagttacagaggagttgagcaatggtatcatagtaaggaaattaaatggaatgcccttagtatgagagttttactctgaaagcacctctgttgaggttcctatcagaaagcagtagcagaagagatgggggtgccatcctgagatgaagagatgggtgccctcctgagttgccttggagacagctgcaccatcactaccgtcctggatgtgaacccaggacctgtgaccagccaggttcagagtgtcactggactctgtcataacccatggacagagtccagtgtatcctagaatgtctgcattattagatgagactagtgaatgttgtaccaggcaaagccacaggtaactacaaaattcactgatgctgttgctttgagagtatagtgtgcgttggtggggggtggggcagcagttgtttttaagttcctgctttgtgtgagtcactgtgttaaatactagggatacaaagataaacaggaacttacaatttaagaaagaatttgctaatgaatagatagccttatattttttattataatatggcaaaatataagagatgtgcacagaatgcatgtaaaatcacagaaggagcaccagcccccatgtgggctggcaggactggaggtgggtgggggaaataggttgggaaagcttcccagagaagactttccaactgaagcatgaggcacaatagcaagatgaggaaggtgggagggtgagccaagcagaagggccaccatgaatctaacacctcgaatgctaacatgaattatcagttagtgtgtgggtgcttgtaaatgagcagagacgggaagctatccaggaagtgtttgaataatcactgggattttgctaaaatcctgttttctactttaatcctttacatgtatagcataaggtggttttaatatgcacagcagtttgtgacttagattctggagcctagcacccaatctaacactccagacttagcactgctaaagctgagaaacctattctggctcctggtctcttaatcctgggtaagggcatcactatttgctcagtatctgaacctagaaacctcgaccttttccaaggatgtcagctccctggcatcttcaccaggcaagtccatttggtcaccaaatccagcctactgtgcacttgaacagtccacacactgcgactgccctactttatgtccttgccatctcctcgaggcccatgctccagcaccctgtcctctgagcctctgatcccaccttccttctgtccagcctccccattgccccctgaccactcccactgtccactactagatcatagctcatagcttcagccagccttcttgacctggtcttagcctatctgtccagtgccatctcccaccgccccaacccccagcaccaagctttcaccattcccagaagccaccagagcccttccagctgttgtaccattgcatgtgcttgggccctgctggaggtacctttacacccctgtctttacctacttagccccttttctcccatcaggtctacccaattgtcacctcaaggatctaagccaagtccattggctttggaattccttttgtgtgcctctgttttagcacatgggtgtttccccttcttgccctaaggtaggcctctcaggagctgaggcctcaccttagccctttcctgtccagcctctagcctggcacctggcaccaagaaggcactcagtcatggtggacacacatgtctcccatccaagtactaaccaggcccgaccatgcttatggtggacacatatgtcagtgaacacttcctcttctgccctgaatttgcagatgacacttctgagattctggctagacatctccacatatgtgaccaacagagtctcaaaatcaagctgtgcataaacaaaatgtgtcttctttcctgagactcaatctgtgagttgtcctttcttatccttataacttgaagttgtagtcacctttcactactcctcacccccacagtcccccacatctgatgacttaccaatttctcttgcctccaccactgagatagcttttaaatctgtccaatcccactgccctagtttaattctctatccctcacgcgggctgttgaaataacctcctaactgctccctgtctttcctttcgcttcatctcccaaaccaccatcctctaaacacaaatgatcatgccattttttggcctgctcagtatcttgtgtggtctctccatttgctactcttcggcacgggctttatgatttgacttaacttcatgcctcccacctgccctaccctccagctacctgctagcactcatccaagccacatggaacagggatggcctttatatccacacctctatggctgtggtcatcctgttcctttctttatatccacttatcaaactcctactcatccacttaagcccaactaaaatatacattctctgaagattccttattcccccaggcagaattagatattccctcttctggattttaattatacctcagttatagcacttaccattatctgtgtaaaaggaggctttgttttgtgagcatctgtctcaaactcaactgtaaaatcattagggaaagatgacgtctcttattcgtgtttcctcttctcccgctccagccccataatggtctccaataaatgaataagtgaatgaccaatgctgatatttgtttcatttctcaaacattagcttttgagctccctatgcagggaccaggctttcatctttatatgtcttccagtgcccaacacagtgacttgtatattataggtacgcagtaaatatttgttaagttggactgacagctaaataattctatcatttgagtaatgtttcattgaggacagaatttttgcacagagcatacaatttcaaccaccaatgactcctgcttggctgcatgcaagaacatcaattttgcagccatgaatgtgactagcattacccacgggtaagtgctgattgacgctaactgtagatgcaatggaaatattaatgagctgttgcttcttaaaatgtttaaaggagatttttgcaatatttaaaaacatgccaggaatctcagaatggaatcctttgatcagcaagggcatttgcctttgaaacatgtattacttagaataccaaaagaaattaaatttaaatggggtggggggcagctaacacagagaatagctgattgcacagctagttgccctgggtatatgtggagttagtgtttcattaggcactagaactttgggcaaattccttaacctctctgatcatcatttccctgaattgtaaaatgtatattaaaatatatcaccattggtgtgcaagaattgcctgacacaagtgcctgctaccaagcaagcacgcaggtgatggtgatggttctttttgttctattgtggcgtcacattcaggcattcaggcggaagcccagatttccgcaccagccccagttgatctgaatcctgttcagatcttcttcttgaagctgtccattttttggatttctttaataaaaaagattatctttatcataggtaaaagtgtagaaagataggtccccagtggtggctcgccatggatgatgggatgtagtgtgattttcatttttgtgttgctggtttggggatttgggataagggttcttgtttattttttttttctcctctgtactttctcagctgtctgaagtggttatgtatttattgtgtcattgttttttaagggaaaaaaagagttatcactaaatctctttaaaaataaattactttagcatctgctgacagtctgccagtgtttgcacctatgtattgcaaagacaggaatacctcccagtgccctagaaattgtaggtgaaatcttctgtctgcgtcttgaagctctcagctgtgtgtttgttttgttctttttctaggttacagcaccatgagcccacaggaggacagtgaaaatcctccatgcaacaatgaccccttgtcagccggggtcgatgtgggaaaccatgatgaggacttagacctggataccccccctcagactgctgccctactaagtcacaagttccaccactaccggtcacaccaccctacacttcatcatagccaccacttacaggcggccgtcacggtacacactgtcgatgcagaatgctaacaatctcctcacctccacgccaagatgagatctgggagctacagaatgttctggaaagaaaaagaaccggcttaaaacccacagcaagagacctcccttgtgtttgtgctttgtgcagagttgtttgagtcatttcctgcctgtcgacatggttaaaaacgagagaaacaacaacacagtcacatttgtgaagatgtgaggctggttctgaaatggaggggaaataagcctgatgaacagacctgccataacactaatggaaggtaacagaaggcgaacctccaaacacagagacggaacctgcaagtgaagctgagccagaggaatgttccaaagagccagaagcattcagctctccttaactggaagagagaaaaatctgctcacccagagactggaatgtggcacatgcagatacaaatgtgtgcattgaagatttcgctttgtttcttagcggtacctggataccacagttgctgtatggaactcatgttatgctctaaacgatgcatctcagaatttctaagtaaaggattatttttctactatttattgaactttcaaacattctcaaactttggggaaaaggaaaggaaacacaggagaagttttcagcagttgccccgagctgttttgtgtgtaatgaagtggttctttgattaaggagctctatttcttatttaactgatatcccactgccccactccacaaaataggaaaatgaagaaatctttctctctgacttgtttacatcatttcacggaaacacatctttgtttgtaatgcagtattctttctctgtgtttgacagagatggggaggggcagaggaatttaagaggttttaaaagaaatgttatgtttcttatgacttgtttccactcctcgtacaatgctattcttaggtttctacgaaacctaatgttagaaccgcatcctttcagctaagggagggttggatttattttccttgttttagagactacaaatttttaaatatcccattttgactgagaatattgacatataagggaagaagttttctaaattgtgaaagtctggttcttaattaaagaattttttttttaatatcacggttaaaagctgctgccagttagccaagacattatccaccaaattgctttgtgatttatacagggattaatcaaatctggctactataacatggggcattgtaactttaaagtagtgttttaattacagtgatgtattttagactcacattttgtgattcaaatatgttataaaggcattcttgcaccatggtaaagaatgtgtgtggtaaatctccgtttatatgtagttggaaaaaattcactgaataatgttttaatgatagggtattatgatacaatgtaaaaaacaattggttcttcagcagtacagaaagtaaactatatatgtgctatcaggaaaccccttcatactgtgtataaaattgcaatctagtgaaataaaccgtatgcaatggaccattttagtggctacagtgatttgttaatgtaccactccttgtgcctcaaggcaagttacattcattttgtaacctagccaggtcagttgccaaactgaaaatagacctcctttcaatgctacagtcaacttctagggcttcttgaccatctagatcaaatatgcaaacaacttaacaatataatgggataaaaatgtatagaacatagctatcccttcctgagcatctatatccatgtcactaataataaatggttcttctctaactgctagaaggattaaatgagtttcctgccttcccagaaaattaaacttcttcatgggatactagtttgtttcctaaggttgagaaactctgtgttaggaaattgattgaggagggagaagtgcagtggaaacttggtgctttcaagaaaagaatcacaaaacttagagcttaaaaatgaaataggtacccctatagaaacacaataacagaatacattttgtatcttttgggtttttttgtttgttttcgtttttgagatggaatcttgctgtgtcacccaggctggagtgcagcggcatgatctctcagctcactgcaacctctgcctcctgggttcaagtgattctcctgcctcagcctcctgagtagctgcgattataggtacttgccaccaggctcagctaatttttgtatttttaatagagactgggtttcaccgtgttggccatgctggtctcgacctcctgacctcaaatgatcatccgccttggcatcccaaagtgctaagattacaggcgtgagccactgcacccggcccattttgtatcttttgtggtaagagtttttcctattccgaacttgaggggaaagtaattgaatgtttatacctaaaccaaaacattgctgagttttaaagatcctgtgaaatatgacatataggctgaagttttgatcctctataattatcttttatctaatccaagggttacatataatgtcatttaaacatttgttgtcattgtttaaaaggaaaaatatgttttcagagactttttatcatggtgccagttaccagtgtttgttaaacatgagtcttccctgagatcctgaaggaggtcctaccaatatcttttcattcaccaaagcctcctgctgccagtaaccaacattgcttatcaatgttggtaagtatcaaagctaaggaaattccaggtcactttatatagctaggaaaaaaatgtcctattgtagcccaaggaaaacgtggctcaggctcatgctagtcctcatggtatatacagttcatctgcatttcagataggtttattttagaaattttgtaaactatactgtagggtatgttttttcctccagttgattgaatactcaactaaacctcattgataatatatttgaaaaacttaggcaatatgaacttgttttgcctctcagagtgactgttatgtggaaagaagtcctgaaataccacaatttcatttccccatggcgatggac

SEQ ID NO: 73 - DNA, 647699 bp, Homo sapiens
  source 1..647699: mol_type = genomic DNA
ggctgtgtgaggaggagcaggctttgaagagatcaggaatccagtgtttggatgtattaggcttgaaatgtctatcagacggagtcagctgtagtctggaattcaggagagaggtctgggctggagatagacatttgatatagacagctgctgaaagccacgggaatggttagggtcacccagggaatgagggtggatgtggaggcgaggaggtcttatgtggaggcaggtagaggttttccccaagagggagttgtaggcccccctgaaagggatcacgaagccccactggaggggagcccggtcctgcagggggtgccgtggaacttgctgtggttgcagggagtgatggagggaagtgtttgcttctccgggaaggagaggtgctggatagattcctgccggagttgcagaaataattaagagaagtaggtaaggatatcctagtagaacacgtgctcggctgcctccaaggaattattaaacctgggtctaggaatctgttcagacatctgggcaccgctgcctcgcctaccaggctccgcctcgctgcccctcccgcttcccctcccctcctctatctgtcacttctacaaccgctctgattataattgatcaaacagaatcacggaatcacggctcatcttgccgttttgttcagtggcccgatccgaaacgagactctggtagtcgggcaaattgtattcctcctccttggaattccgctcacagaggccttcccggcgtggccggcccagcagggacgcgccgccgcagcggaggagagaacgcgggcggggggctgcaggccggcgcggggggcgcgacgccgccggcggggcgcgagggggtgtgtccgcgccgcggccaccgcggccaccgcggctggcgcccgggtgcgccgcgcgccccggcctccccgggggctcctcacgccgcccctcgcccgccggcggccggggcccgctccctttgacgtcatgcgggcggagggctcgctcgggcggcgctgccgcgggcgccgggagggggcccgacttcgggctccagtccgccgccgtgcgccccgcgccgtgcgcccggctccctgcgcgccgccgcagccacatctggaagcgttcagcgcgtctgcctccggcgcgccgggcgggcgggcgggcggcgcgggcaggggcgggcgcgggcgcggcggggctgggccggggggagtgagcgcggcgctctcgcgcgcccggtgtctccctctcgctgcctctgcagaaacagctcctgccagagcggcgctcggcgcggcgcggcgggcccggagcggcggcggcggctcttcctgcctccgcgcccaggagttgccggctccctttgacagcagagagccgggcaggggcctcaggaggactcgctgggagtgggcagaggcgcctcggcccctgccggcccaggcgggccccgcgcgccccccgcccctcctctccgcctcttctcgccctgcctctcccgatttattttttcaaatggtgtagccgccggaggtgcggtgctcagttcttggaaggggcccggatgtactgaggatgcgttacagtttcactcgaggaggcagtagtggaaaggagcagtttttggggtttgatgccataatgggaatcaggtaatcgtcggcggggaagaagaaacgctgcagaccacggcttcctcgaatcttgcgcgaaagccgccggcctcggaggagggattaatccagacccgccggggggtgttttcacatttcttcctcttcgtggctgctcctcctattaaaaccatttttggtccatggtcaatgagaatacgaggatgtacattccagaggaaaaccaccaaggtaaggctggaccccgccgcctcgccggggctccctgccttttccaccgggttcctgccctacccgcgctccccgcggccccggggccggtccctgcggagtggcccggggccgcgtccgcgaggggcgcctccgcctcgtcggagcgcccgggagcccggcgggaccggggcccgaaccgccgcgcgagacggagcggaaaattcccgcccctccccctccgggccccagcttctccagagcatgtgtttcctgtgaaattccaggcgaggggggaaaagttccccaagtggctgccgccgcctcgctttctcgcgtccgcctggagagcccggctgcctggccagccgcgcggggggcagagggcgccggcgccgcggagcccagaggcccggggtccctcgcccggctcggggcgcggctgggagcgcgcgcgcgcgcaccctgcgccggcagagcccggcgcccacggccgcccctggggcgccctcgcgctgcccggcgtccactctcgtccaggcgcccctgccctgggcggcgcgctccaggtggcgggtgggggcggcggtgcagatgtgaagcccagcgcgcccctctggttccccctctgtaggtccccttcttcctctctccctccctcctccgccgctcacctacacccacccacctctccactgctgttgaccccgagcgcgcccacgccgcgtgtgttctcattcgcacccacatgtgggctagcacctgaggatggaagcggcgaggagccgggcggtgtgtgggctttgctgtttcgtgtttgaaggagatcatgaaagggtgtgcctggctcacgcggctccatactattgcccagtgttttccgagcatctccatccttggccgcgagtgtcaccagctccccctgtgatggtgaaaggcagtcaggtaactccctacttcctggaaactttctccctcaccgctctccccccatattaacaagttgttttcttggacgttgcttagcatttaaggttttggggacggggggtgcagacagggtggtccagcggggctttctggcaacctccaggcatgacatctctttcttctcgccactgctctgtctctttgggtgtagtctctcccttttctctcccagttcccagagcctccctgtttgcactcttcctcttctcttcccctgaaagcctatctgtcactgctggtctctgttccttccctgggttcttcccagtgatcctctgaagaccagcctggtggaaggagttgtctccaggtctttttgtccagctttttccctctgtttgctcccagctccaccttttggggacagggccttcactctttagagccagaagctgccatccagcctgcctggtctccatctatcctgaaaccgattttggggccagtcttctctgctttccagcatgggtggcagcttggggattgtggcctcctttggaagaaagaatcttgtcaagggtcatgggttctagggtgagccagagctttggggtcacaagggcagtatccatgtttggatttctctactgttgaccccatccctcacctgatcccctctcccttctgtagctgatgggctagtgaatggtttaggagggaaggagtgagacacaaaagagggtggtatttgtgaagagtggggatgcaagatgactcccctccaggttctgagactgcgtgctttacccacctcctcagtctaagcagcattgaagaggagagctctgtagtattgccctaagtatcactgtcaatggcaatgtactgtggtaataatagtgattattcaccttattcacaggatgataatcttaactagtttacaaggtctcctcttagtgcaggataaaccccttctgaacccatttccttactctggttgttttctttggcccctttgcctctcagcatctccctgctgtatgctgggagcagacattaaaagtaggagtgccaaccccagagaggttcctgagaaaggtagaggggaagggagcaagggagccagcggctgagagctctacctttccagcaacatgccagcaaacgctatggcaacctgaattccagttctctcccttgaagctgcagtgattatataattcatgggagcagttttgcctccatttctagatgcggttcccaggtggaagagcaccaagatccctgtctcccctctactctccatcttctcttctttagttggttggcattgccgaggttgttggggtaggagaggggaggagggtggtggaggtgggaagggcagacctagaacagaatgaatattgacaaggaagaggttgctgtggctaatcactaaagggggcgggtgagccatcataggggttagagtttcaggagacagaagaggagtctaggactgcctcagaagatcagtaatggtgacgaaacaaagagtcgagaaccaaaaaagttgtcagtggcgggggctgtgcattcctctcttcccgacatgctctgagatgtggaatgcaccagtccttgctccctcaccttttccgtggagtgtgtgcatgtgtgagtgtgtgtgagtgtgtgtgtgtgtgtgtgtgtgtgtgtgtgtgtgtgtgtgttgagggtcgaactggagactggaggtcagtgcctgggaacagcctggaagttcattgaaggaccagcttctgaccctgggtttcaggctggggtggcacactcaagccttgcctcgcctctggtgccctgtctgctctgggcctgtgccagcctcccacttttctgggccgattttctattgcaggctccagctagcaaatgagtgtcttaatagtcaaccattgaacaaataaaacaccagaatgtcccttatctgctagagacaaggcagaggggagaaacatgtgtttggggagtgcaagacacactgtgcttttcttttaactacttagcgattcagcagaataagaatcactgtaataaggtaataataataatgatcacagttaactttctttacaaatggtcagagaacaacattgctcgcacatcagcttgagcaggttaaagaaagctgtggcaatagctttgctttttcttgatcctgcatggagaaaactggaggaaaggggctattggagttcatcatattattcctactattggtcaggcactttttagtgttttagaatatgacaatatattaaaaagagtcaatttttcattatttccatagaatacacactaacagtatttaagtgtgtgtgtgtatacatacacacatggaataaggaaaagctattttaaatagatcacacgagaggctaatgcccttcagggacctggggtgttgagagagaagtattgataatgcagtctcctaagactgtttaaagatttcttcttcatagtaaagggagacttgttcttacaggtagatgctgcaggcacagtgctttgtaaatgaaatgatgagccgttagccccgtgggaccatctctcagtcttggcaatgacctaggtctcttcaatttgttcttcaaataaaactgcttgagttgggttcttctgtaagacctatcaaagggatccaaggagcatactgactggagatttcgaggccctgctcatcttgggatccctgcttcctagtacaggccgctgctcagtccagggcctcgatgcaaggctgaacaaataaatgtctgcgtgaatgaatgaatgcgacctggccagacctgcagtagatgtggcttctgcctcttccagtaggtggcgccacagggcttaggagtcaggaaaggggcttcagggtccgcctggtgatgaaaggtgtagggggagtttagagcttgtgacctgttggggctgtgctgcttccatcaggcccacacctgccccggcacaggtaacccaaaagaccagtgtgtctccgtgccgccgcacacactggaggccctcgcggcatcactgagggacccaggtcccacagtgacctctccaccctgttgtaatgagaactcctttggagcccacccagtccgtcgcaggctcttcccacagacgtctgttcccttccagcacagacagcatcccgccgagcctggaggaagccttttgggtgaatcgctgaacttggtatggccagatgttaattttctccctgatttttcactgatggtttagtaaccagagggcccggtggtgcccaagcccagtggagcatggggtgacctgaagcatgggatctgggaacccagacctgtgcagtcacagagcttgccagccaaaggcaggaggacattttcctaactttaatagggaaaagaacacaaaaacaactgggtgcacttcacagttgatttccgtttatgagtctgcctggatctcctgctgggtaatggcagaaaagctcaggagacccaggttaggaagtaactgagatttgttctaatttccagtgatgttttccagcgcctggcattttcttttctattcctttcttcactcggttttcttagttgtgtggcaagttccatgaggtctgagaagcccttggcactgtgctaagaaggggtgagtggctggcagcactttcttccttttacagtaattcctcccgcctgatacagcagctgtttgttctgtaggaggtacaggtcagccggcgtcatctcacctcttccttgctgggaccctgaaatcagtgctgagcattcagatttagcagacaattttattttccaatatggactacagaaagctgatagactgtttgcgaaacacctggagacttaacaacaagcctaattaacaaaataatcacactgatttcatctgtttctagattccatcctcacagttgcctaggttaatgttgggcactgtggaggagaacagaagattggttttaaaaaaaaaggcatggggaattgttttgcaacatatcaggtgccaaatatttagggacagaagtgctaaacattctgataatgaaataacactctgagccatggctgtcattattaaaataatttagtaaacacctgtttacatgtacctcaaggttagataccacgtaaaacaagtaaaagtgacaggatccctcggggaaaatggaatggaatgtttttcggtgtcatttcgaagccgggtgtgtagacttaaactgaacccactgcagaaaaagcaaaatggaaggctgaaataatgaatgccatcatttgaactgaaacctgggcactccagaagagctcttctctgtgttttaattcctagatggggtgcttatttgctcaagaccaggctttcctgagcctgtgtagacacgggcctggagcaggtagacagaccctcttggtttctatagttgaggcacccctggaggcagctgtttatcatggcaggaagggaagtggatgcattctctactgccccctttcccctgccgaattcaggcaggacccgcgcaggtccctggagaaccttgcttcagtgctagctgtgtgtaccgtgtgggcaggaccccagctgggagatggggagcccaggatgaccccacagaaaagcagagctgtgagatggctggagcctccgagagctgagatgcagaaggtgaggggaagccagaggagccccaactccctagggtgtctgggagggtttggggaacaaggtcatcagggtagtcagttactccttgtggagctgaactgaatttaagttgggattgtagggactgtaggagagaagtttgggcctggagctcaggagtcggaccgaggttgaaaatagacccttccttccctggaagccgagggaactagaggaagggttcatctggctgaagcagagggtgaggaaagcgggggttaactggcaagaaacccaaacctctcagcccctcccctccccaaaaccccacagaacagttctctgcaaaacaccttcactttaaaatgggcttcttgtgctataccctgtgtgtatagggggcaaggggctaggctctggttcgttaaagggtttgtcaaacatagaataaatgtaatgtctctttgggaatttactttctaggatcaggacattttatgggtaaaggaaccttagagacaatcctcatttccagttgagaaaacagaggcccctaaaggttcatggaggcagggatgtaactaaatacaaggtcttcagtctcttcatcctcctgcctgtaccacacttggtgctggccccctgagagagcattgttagtgcttctggctaaattttgcttggtagatctttcaacctctctattcttcctccccctgcctccacctttgtactgccttaaaataatttctgcgatgttagatttaggaatggagttggaagggtggggtgggggaaatctatcattggaaaggtttaaaaacactttcttaggctacagagtagaagttcatacatgtccacaagaaactcctgcaaaattcagatcacgattttgtctgcaaacagatctgcctctaagccttttttatttgctcacttcctctcggccccaatctaggcttgtttcagcccctttgcgagagtgggatggggatgggaagccgggctgtgctgtgggacttccctggtgagctgctgggattcttcatggaccagctggcattaccagtagctggggtatagacacacagatcagccccagggtagagactgtgagacaggctgccacagactccacctgagctgggcgaccaagggcgtctttctgctcccatgtcagggttggtctcctaggacccccggcctactcccaggagacattcccagcagtggtggtagactcagcccatggaagagaatcactaggacctgcctctgacattcccatcttccttgaagtgttcattggctgacttgtttcatactctttcaagtcatctctgagaaactggaaggcctctgaggctgactcggtctagcttgaagacggaggcatgagccaggctcatgcttagagatgtggcttttgagttccctggaggaagccatcatttcagaacatagtgttgtgataatttcatgaaatattcaagctgccaatttgccaacaggggtttcttttaatacactcggctacacttggtgttgcccacttgaacctagctaaaaggaaaataaaataatcttgtctcctgtcctttagagaaccaagccaaaatctagacagtgaatgaatgttcttctccatattgcctgtgggcagaaatgttgacttgagtactcaattaagctctatttactttataaccattgtgtcatgtacagtcatttatattcctttctttcttccaaaataatctacgttgggctaaaacctttcaaagacattaacaaaagtaacaaagtaaatagctaaagaataaataaggctgtaggctagagaaatgacttgggtcttgggtcacattctttgacttcatctctttctctgagagttcagaaggaatcaaatccctttttttttttttgtctgtaaagtggagataataatccttagccaattcacttcgcagggcagctgtgaggatccaaataggagaatgagtgtatatcgctgttcaaacatcagctactcttattctccccatcagcgagcagagcaccagagtttggaaaagcaacgccatgaagtaacattcacagcatttcaaacaactttggaggtgttgtgggagggctgacattattcaatattttaaaggtgaaaatgtaaaacaaagagaaaccagagtctgaggtggtctggctgataccagaataatcagggaggaagtgaaccattggttgagatgggcctggtattttgccctccagagagtctaggagcctgtggccagtaggctcccaggacggtggagccatgtgcactgctggcactgctgctgtttccaagctgagggtgaggacatggggatgcagggtatccgacgcctggcagctgtccacctgccatgctgctgtcccctcactgccaccacacatggctgcctggcttcggcctcaagtccaaagccacgctggcctgaagtcctttcatggcctgaaaatagggccattgagggcaggaagaacaccacctgggcaaccaatgtctcctcacttttgaacgtgaattccccaaacctaaacccaacttcccagtacaggaggacgggctggaaaataaaactttgcttcaaaagtaaactttgggtttggaaaataaacttatttatttttcatagccaaaatgttgcaggtttggagatagaggggacagttctgtgtagctccctaagacactgatcaaaataggaaagagctttaacattatagtctaagtgacaggattagttttagtttcccaaagcaaaaataatcccatcatcaaaaagtatgctgggaaactttcgcactttcgcatttgtttgcaccttgttctacccccagctctggtcctgtgatctgtggagccatatatgttttaatttttctctaaagaaaaaaagctgtattgaggtataacatctaccttgttataattttaaaatagagcaagagtaatagccaccatttattgaatgcctagcatgtgttagacaatgttcttggtgcttcatgtgcttaatatgttttatccttacagtaatcctaccacgtgggttttaattatattttttagataaggaaactgaggaccaaagtcttaagcaatgtggccacagccacccagacagtgttggggctgggaattaaattcaggtctgtcggactttcaaaacatttgctctttctgttacttctccccatggagaacagtagaaagagaaacccactatctctctatcctgggaaaatgaccttgtccttgccttctggaacctggcttagatttgccttgtggaagctcagagctggaatccttgttcttacttgatggctgcatgttgtcgtggtaccccgcctcccctcctggtcccgtcctctggctttctttccccttattcccagggtttctgccagggccctccttgcttcttcacatctcctcacaggccttcacagaccacctaggtcagtacaccttgtctcccgggggacccatttgtggcatggccttgcttcaccacccattcttggaatatttcctcagtcactccctccaggaaaatagacactctccattctcaaacgagattcccgtgagtcccggggaccatccctgtaagctgagctctccagacttcatgcattatttatttatttattttgaaatagcagctttgttgaggtataattcgcataccgtaaaatttacccttttgatgtgtatgattcagtggtctacctacttccccaatattttcatcacccgcaaaaaataccctttacccattggtagtcacttttcattcccctctctctccagcccttggcaaccatgaatttacttttgtctctatggattttcatgtgttattgacagcaataataattccttttttttttttttcctgaggtgtagtctcgctctgtcaccaggctggagtgcagtggtacgatctcgtctcactgcaacctccgactccctggttcaagcgattctcctgcctcagtctcctgagtagctgggactacaggcacccaccaccatgcctggcttatttttgtatttttagtagagatgggatttcaccatgttggccaggatggtctccatctcctgacctcttgatccacccgcttggcctcccaaagtgctgggattacaggcgtgaaccactgtgcccagccaacagcaataataattctacagttggagtttgctgtgtagtctgactgttgataacatatctcacaaatttcagacctagataggtcatgacaatttacatgataaatgatgacattgaaaggaagcacgtgaaattagggagctggctgtcatttggaggtgggattaagcgttttctttcaattatacaaaaaagtggttttagcatttttcaaaggtatcttagcataatgtcttcaaggttcatccacgttgtaccatgtgtcaggacttcgttcctttttatggctgaatagtatttcattgaaagcacacgccacattttgcttatccattcttctgttgatggacacttgcgttttcaccttttggctattgtgaatggtgctgcaatgaacaccagtattcaagtatctatttgaatccatttttagttattttgggtttacctaggagtggaattgctggccctgcaatatgactttttagctttaagagcccacttccttgggtagtgccccaaatttgaagcccacgtagatgagactacagcattaggaaatcctattgtgtcagtagtgagggtttggtatttagtctgggctcccagttcctataccagaaatttgactttaattggtgtttcacaatctgacagctgccttttgatgaggagtgactgatactgcctctgttcaaaaaaacaaaatgaaacaaaaacgaaacaaaaaaaaccggtgtctctatatccagttcagctttcacctcgttgctgacctggcttcgtaactcaacaggaaattggtgtttggcaagacaaagctatttagtctgtctctgtctctccctctgcctgtgtgtctagtccaggagcacccatgtctgtggctagagatgtgggcctgataagcctggggactgttgggagagggtggctcccctcatgtgtggctgggccgagtcctccctggactgtgagggggaggcagctctgtgctctgtgctggccaggtgctgcctgccctgccccaggcatgactgattaataagggatctctgccttcagcctgaaagctgccttcagaggggaaaagcagcttcccagggctctcacctgctcctcatacatctaaagtctaggcaagagaggcaaaaacgtgagaagaaaggtaaacagtccggggagaaaattgggaaaggaggaaggggagagggaagcgagcagtgggtagacagccaggggaaacagcagcacgtggtaggctcttggctgtggattgatgccccagttaaatgactctggaagcctctttccagtcttgggataggtattttcttggtgatcattttacctaagagtgataatatcatcggctgcatttctgtcttagcatgttgaactctgctaatctgaggaagaaacacacacatacattgatgcctcagctgaacccattaatcagagacctgggtatggataaaaaagcgcacaggctcatggaggtatgtgaagctcagaagactttgcactttgaaggccaatgtacttaatttaatccaaccgactattagtaaattcctctcctttgggctctgccctcacaccccctcactggccctgctcacaggtgcctctgggccgctgtgcagagctggaatgttgcacagcatttctccaaggtggaagcttctgttgccatatctggctgcctgagacatcctggggattcgagctatacatccaagtggatttcagtgactcagagctcatatttggtctgtcgtgaataggatcttgtgcctctgtttttaaaattatttaaaaggcaaaaattttgacctatgcccagctgtctgaaagaccaggagataagaagccttttctaggataaattgactgtgaaatatctctgaaaatgaactgtctcatgccagttgtgatgaaaacaattctaaatagttttttttcctccagaataggaatggttagtcattaacaaaaagttattgagcgtctgctatctgcaaggcagtttgcttataggatctctggattcaagggtatcttcaaggtacagccctcaactatcccttcctttaagggaagtatctattctaggaggtaagatttatgcctagacacacagacatccgcaactgtaataaaaggcagaacatgcttgatgttacaaggatataaagataaaggctcacagatttaaagaagaagggtggtatggaaagatggaataaatggaggaagtgttatatggaggttgtgactgagccgtcccttgaagggtggatagaaatggggtggagaggagaggcgcacattcccaacagaaagggtgggatggcctgtaatgtattcacagggatgtgcgttggatttcaaaggagtagtgagttgagtttggctggagcaaggttttgcagggggaagaagtgggagagaaagttggaatggcaggaaggggataatgcgtggagcaccctgtattgggctgaagagtttgcatggcatttggtaggcaatggagggccgtttaaagtgtttgagtggagagagggtatactcagagctgctcttccaggcagcaggctagaggataaggtaggggagtcgaggctgcaggtagaggggcagttctgaggctgttgccactgtccaggcaagagagggaaggagtgattttcccagcagaaagccagagacaagggagccctgtgctgtgatctggatgggaagggtagaggttgtatttggaggcaagtagaagatgcccagcatgcacgcagaattagagttctgtctaagaaggtgctatttgaagctgtggaggtggagccattggggagagagagagcagagggaaggaacgatggagagctgaagacagacaggaggagggtaaaatggaggagacaatgacagagtagtcagggaggtagcgggagagccttactactgcagggtcttggggatcaaggcaggagagcatttccaggaggccgtcattgctgaatggagtcgtgaaagggaagatgggaactgagaagcccgctggattgaatgattgggctggagagtgggttcagagtgactgttgtcccgccgaactgtgcaatgatgaggcgtggtggttgtgaagcaggggcagcacatggggaccactctttcaagaattttggctgtgaataaaaggagaggggagggatttgttggcacatgagagattggaaatgcaagagaggggagcagatggggaagaaggcagtaggcagtggcgttggggatgggagtggaaggctcaaccccagcaaaggaggtagcactctgtcttcagaggcagacatgcagtaaagcaggggatgaggaaacgtagaggggcatggggggagctggaaaggaggacaggaggggcctcgggcaggggtgctgaatcctgggagggatgaggcagctggagtggggcctgagcttgaggagaccggaagagggaacggtcagtgggaaacactatgagacacccaaagaaatccacaagggtgcccaggtcccagaggcaccggccgaggtctggaagcatgagttaggggccaggagtgattggcattcctagagaaagcttccccagaaatgaatttggcaaagtgagacagctgctgactaggtctgggggcaaagggttctagctctgtaggaggcgtgccaagctcgagctggtgtgggagaatcaaggtggccagtgggatgcaggagccaggatgcatcgttttagtgggagtcagggagtctgaatcccccagcctgcctccatcccaggtggattagtcatcagaatagccaatgggccccttgagctctgagtggatgcacaaagggccaggtggactttctttggggagcataacaggaagaagatgacaaaagcctgggtggtggagatggtggcagtttaaggatgtgggcttaggactgtggactaggatgcacgtgtgtgtgtgtgtgtgtgtgtgtgtgtgtgtgcgcgcgtgtgcgtgcctgtatgtaagggcaggcacatgaagacagactttattggtttcacagtttggcctccagagggtcttctgggtgctgacaccaaagcagagagagctcgtggtgtgcagccctgaggtcacgtttgtgacgtggatggaaggaagcaggggatgggaggactggtggaggtggacgtcagacaccaggcttcccacagactgtcttgggcatcaaggacaaggaacctgcactgttaacctcagtcagggcgcaacggtagaaaggaggagtgatggggcaatcaagaccacaagtgccaacctcagcgcactcacctggagaatacttaccttcacactgttcccacccctgtctttccatgcccttccatccaaaccaagcccagcttcacagcctatgatattggctctctggagaaccggttagcctttgtggagtgttaagccctgcgattttatatccttataattatatcagaatatcaaattcctgagaacagaacattttgttatttttttcttcatcctctcccctgttgtaatcccacaagaaaaatgttacaaaccactggaaagcctctggttggatcccacttgagctttacaatgccttgatttccctgtaatcaagaaaaatatgatatcctgaatgtttcatgaaaggatgtgagtctttgatgccaaggacagtaacactccttgaatgccatggaaatatgctctgctgagtggctctgagcttacccttggtgtaggaaggtgtgaatgaccagcaggtaccccccagaccctgccccagtccctgtcacatatgcagaggactctggttgggaggggtctggtgtgggggagggttgtgagtggcctggaggcctttcccggaggcaggcagagaggcggtggctgcaaagacctagtgtctctgagttgaggaggctgggcttctgcacctcactcaaattctctgcagcggccagagcccctgcatccattcttatatgttggcattgttcccaaaagaggcacagttgttgacttctcatagatgccaattttcgtgatgtttgcaatactagctcctcatggtaaaatgcatagacagtccagtggccccaagtccttgcctttgttcttccatttttggctagggaagtagcactagtcttctgtgtgccttgcctggaaacagtgtgttatgacggccctcgtgggagttggcatggcaggccctgtggccaccatctcaccccgtctggcctcatctggaaacctacttgcagagtttggccttattctgatgaacctcaagggcagcgctgaccccagcttgatctcttgctgggtctgggcaacaaaaggctttgggatttttccttttttccactccagtgaaacttaggcggaatgcaatgttttcctctgagggtatcagttggggaatgaactcagagtccagatggacagggttccgcagttccagctgctgccatactcagacaactggtcctctgcatttctttggagtttgacttggctttaataaaatgaaggagaaaagaaaattttgaggaagaaaatgaccagaagaagaatgtccttgagttgagggaagccatggaatgggctggtatcctgagaagtggactcagctcttcttcagagacctgtagacatcacagcctgcaatcccatgcgtccttggccctcagactggtacagctagcatccctcctaatgatttttcctgggtctgtctgaaagggtgaggataaaatggcaatcagggtcatcaacttacatctttcaggcccagaaggaaatgaacagaaaagttaaaccaaagacggagccttatggaaagattcctctaacacttgggagccaaaccccaagttatttgacttgcatgtggggggtgtgcctgtacgtgtgtggatgtgcatttgtgtgtgtcagagagaaaataagaagcagaggaggagagagcagtgtgaccgagcttgtaacccctgaaagacagcatgtggtcacaagatacagccatatctgggagcaggaatttatgttttagatgtattgttatctgtcacattggcattttgttcgaaccatttaattttcccatgtctaggattctgcatctgaccttcctaccatatgaatctatttattcttgtaacctcacttataatgaccgttacttgagtatttcaaagggattgatggaaatatggcaggagaaaactttgtgtctggtcctttacgtactattggctgcattgggacattatagcatagactcaaatgcttaaagagtcttttcttttctttttttcttgagacggcgtcactctgttgtccaggctggagtgcagtcatgtgataatggctcacggcagcctcaaattcctggactcaagcaatcctcctgagtagctgggactacaagtgtctgccaccatgcctggatacattttaaattttttgtagaggcagggtctcactgtcttttccaggcttgtttcaaactcctggcctcaagtgatcttcccgccttggcctcccaaaatgctggcattataggcttgagccaccatgcccagccttaaagagcatttctgagctaaatttgcattaagaaagaatgtcttgggggtcgagcgggaagagtataaaagagccttgctccatgacttcaaaaatagtaccagagacaaaggactttgggtcttaaaggaatgaggatgtcccatgtttgcctggccttgcatatgaaactactgagagagtcttaaatcggggatgctttatcttacttgtggtaggtgtgactaagaagtcacacccattttcaagaaagtctttgagaggaagctttattgcatcttgcattccttttcttctttctgagtttctttcctagtactgaagcatatattttttagttctttcagcaatggtctatgagtggtaaacttcctcagtctttgtctgaaattttcttttattccttttggcttctcattctagaatgatagtttagtcaggtacaggattctgtgttagcagttatctttcttcagcagtttaaagatattccattatcttctggattctattgttgctgatgagaagtctgctgtcagtctaaatgaataatcaatattctaatttttgaaaagatatattagtgttacgcagttttacaatgatgtgttaattacatagattaaaatatattgctgggagttggtgagatacttcaacttgaagattcgtatcactcaccagttcttagtcattatctctttctttctttcccttcctttctttttttttctttctttctctcttcctttttctttctttattttctttctttcccttccttccttccttccttttctctctccttccttcctccttccttccctttcccctttccccttccctccctccctccctgcctgcctgccttccttccttctctctctccttccttccttctctttctccttccttccttcctccttccttccctttccccttcccttcctccctccctcccttccttccttccttctctttctccttccttcctccttccttccctttccccttcccccttcccgcttccccctcctccctccctccctccctccctccctccctccctgcctgcctgcctgcctgcctgcctgcctgcctgccttcctccttccctttgcttccctttcctttgacagggtctcactctgttgcccaggcttgagcacagtgagtacttggctcactgcagccttgacctcccaggctcaagcaatccttccacctcagcctcctgagtagctgggactggagatgtgcggcaccatgcccaactaattgtttcatttttagtagagatgagatgaggtcttgctatgttgccgaggctgatcttgaactcctaagctccagtgatgataccacctcagcttcttaaagtgctgggattataggcatgagctactaccgctcccagcctcacgatcttttcaaatattatctctcccctagtcactctattttgttcctctggaactctattattaaaacatgtattgatctttctcattttactctttcttttaaatgttctttcatattccatattttgttatctatcctctgctacactctggataatttcttctgctttgctttccagttcaccagtttccccctcatttgtatctgctgcttagcctttaaatgcatttgcaatttcaatgacattttattcctggaagttctactttttcaaatattttagttttttcatagagtatctttttccctttataatttccattgtgaatgatttcacaatatgtgcgtgaattctccattccttggtgctctgagcatggcctgccatactgccagaactggaaatttgaacctgtgttttatagtccactaataatactttactaccatcacaaggatgttgtgaagacaaatgagataatggatgtggacatgctttgaaagtattcgtatatttaccggaaaggggttataataaatatacctctgcttggcttgttaaataattctctcttgaatcagacatttaataaaactgtatttgtaaggggaaactcttcaaatgtatgcaacaagattatatatatacaaatatatatatatacaaaaaatatatatatatttggaaacagagtctcgctgtgtcacccaggctggagtgcagtgatgctatcttggctcactgcaacctccacgttccgggttcaagcagttctcctgccccagcctcctgagtagctgggactacaggcacacgccaccgtgcctggctaatttttttgtattttagtagagacggggtttcactgtgttgccctggctggtctcaaactcctgaggtcaggcaatccgcccgcctcggcctcccagagtgctaggattataggtatgagccactgcacccagcctgacaagataatatttaatagcttacctcctttattgcctcctattcatggcacctaatgatttctagtctgttcgatggaacttacttatttacagagtgttttaaactttcaagatgttagtccatggtttctccttttcaatgttttggtatataatttggtatatgaggtatatatcagatctacattaaaatatatttttggtacattaggtatctattaggtaaattaggttaggtgtattgggtatatgtcaggtatattaggctaactcattctactaccttcatttagggaaccgaagacagggcagactgtcagtcaacaatcaatcaatccatgttaaatgtgtgctcactgtgagcttggcactgtaatagccattggcagagggcataaacaagcataaccaattttgacagccatgtattaagtgtctactagataccagacggacacagtgatagatacgttgatgaataaaacagatgggcatctgctgtgctagagcggacagtggggccgctggctggaagtgcatcacacattctcagtggcggcaacacggaccattgttaaaccacactcgtttgagaagtgagtgaatctttcagctctcaaagtcttgctctgttttccatggagctccagtgcacaggcagataccctggctccatcaaggaccaagtgtttaaaaaaacgtggtccaacagatcagcagcttttggtataagggggtcaaatacaggatgaaacatgatattttgtgaggttgagtggctatctctatgtcactgaagtttgtctttggttgtcaccttacccttctgtgcccttccattgctgtggaacattctcacttcaccctcagggatctagggcttctcccttgtatctctccttccctctgctgaaacatgaccacagagaaagggcccttgctgcactgttcttgctcatcctggcaatgcagtgctggctgtgtcttggaggagctgggctggccctccaggccaactttgccaggagacagcacaggtgggaggagaacggtctttaggatgtagctgaaagccccacaggagcagagccacctggaacctgctcagagggcggctggaatcaactatttacatttttgtataaatttaagtcattttgtcttccctctgaagtatttgcatgttcagccttttctctaattgtgaaatgaaagactgtctcctttccaagaatttcaggcatcagcaaataagttcaggaggaattagtaagatggaaatcatcctgtggatgattttgcccagcctatgacttccagttaaatccggcaaaggagaaatctaagatgacaaataggtttcagatcctgtgtggatccaggactggttatggccacctggagtgctctgttgaaaggaccctgaaccattgcctaagctcctaggggaaagtgttcagtgatggattagtgatgtctgccataggcctaggcaggagtgaaggtaagcggcaccactgcaattctggccattcctcatagagtcagagagttgcttaggttgtattttatacagcaagttgattcaatcattgccatcaaacaaatacccaattcagtgaaaaaaaaatcagttgaagtatgtgttaggataatgtagataatgtaggaaaaaacatctgcccattaaaaattatattcttccctttttattcagctaggttggtaaatcatagacatatttttaaaggtgaattaatttgagagcttctaatttctgttctagactcctgaaggagtctgcaaataatactttatagttttactgcaccttcattctaaggatttttcaaaacatctcatgcatgttgtctcattgcattgtttacttgaccccatgacagatttgtttccagcatacaggtggggaaactgaggctcggagatgatctgacttgccgaaagttgaatggcaagtctgagcaggtgcaggcttggccctgctcttcttcctttgtaccatgaacttgttgcgactcctctggggtctcctctgggagatggaaatttccatccagggagtactgttattgataggccctctcagggggaggagactgccagtgccgtgactcaaaatagctgtctcttccctgctgaagatgttgccctttccgcagcaaatggatgaattagacccccctgcttcgataaaatactttagggtttatagggtggaaaattttgtttggaaatgaaaatagcccatagccatccataccctgaagctgtcagctaatgccatctgagtcacccctccccatcttctggcacctgtggggagcctccctgtggtctaccttgcggggtctgagcttggccatatttggcattctggagcctgctggctttggaagtgcctttcaacctgccaacacccacatggggacccggatcaagccatgtgtttaaatgactgggctgtggagggagctccagtggagacgtccaagggatgtagggccatttacttaacataaatcagttccctgagtgtgagtgtcttaatgcattccttcagttataaacagtttagagccatgacagccaacatcttttcacccccgctctccttagcccaggcctccatttggatttgtttctacagccagagactttgatgattgcaagggatgatagggaggccattctgaagacaaataaccattgtttatggagccctgactcctggggtggcagccgctcactgggtgcaggcatgggacctgctcatcagctcctggtgggcactaatctaagtgtgtcccatactctatcttgtttaatcttcccctcccattgatgaagtggggacctcttacattttacactttagagaaaattttacatttatggaaacccattttacagagaagaaacctgacgttcccagggcctcattaatttgctcaaggtcacacagctattgaatgggagagctggaatttgaacgtaggcagcttgttttctgagctctggcttctaaaacgctttgccatgtttatgttatttcctgtctaatttggaggctttgttgctgggcttttgagatctttcttgcttgcttaaatagcagtccataggttggcagaacaagcctgtggatactgccctgacctccggtaggaatgttcacagaagtggcgtcagtaccatggacttgtccttgtcccaacctcagatgtagaacagtggagccaggttcccagagtcctggcttgtgctgtgccccaggtttctcctgggagcggatgtgccagggcttgttcttgggagtctgcctgcacccatggagaactgacagtcagggaacccattttggtataaacaggggttggtatatttagaaataatctctagagactgtcatatgtgcttatctgcatgctcagagataaaagtcagggaggtgggtcagtaagaaaatgctggggttgacatccagttgacacatggctctttcccagggacacagggcagcctgatacatagggcctattttagggtctttcattatcggtttggaattgtcgctgtctgcactgcagtaaaacaagactcgcctggatctgcctttcctgacttgagaaaaaaagatccttacacaggcttgccttcgattcccatctttctccaacgtgctcacatgtgctagggttttttgttttctctctgcaacccacccgcagacgtaaccttctgattcactgtctaatttagggcagaaacttgcagagcaatgtcaaatgggtctgttttcacttctggatattacacatgcgtaatgttcttgctttgaaagcattccaagaggatacgataaataaaggggctcgtacacatacagctcagtggccacgtggctcacatgggtctgctgcttttgggagcgggccatgtttcttctccccttccttccctcgcctcactccctccctacctacctcccccctcccttcctcccttcacttttccccctcctttcttcctttgttaagcaaaataattttttcattcatgagcaaaaacagttttccaagggatgtgaaaaggcaacagagatggtatctctagtaccctgtatttttcagtcacaaaattatttgcctctggcttttttcccaagttcgattcccatttattctacacttgtatcggaaccattgctgtttttaatgggatgacacagttaaaatgagcccctgctttatagaatgggacttgttagacgggtcaccctggttggaaggcccgggagacctctggctctttaaacacgcagttgctgtgtgtgaaggacactgggttctgctatacggcactttctactgagtgggaaattgagacatggaacatgaaccagccacccctggaatccaggagagggctgaagcactggctggcacgtgccctggagcggacgccatgctgggctcactagctgtggcttcatgtttagcaatgaggtcgagcaacattcattacaacgcattgcccacttaagtttgatttaagatgtgtaccgtttatgatcaacagggaaatttaatttaggtacagctaatagctgcatgtgtgagtatgtgtgtggtaggttgatgagagtttcaggcatgttgtttaaatttgaacattagctaaccttctaggtaagtgtttcataatggggtatcccacatataaaaatgacattagggttcagactttgcaattgattgcacatctctcttttctaaatgttttcttctgtctttttcaagagaaaggggagatcttaatgtatgggtagtccaaggtacataatgttttatatcacagttttaaatttgtattactttttaaagaggaagatgaagtagtagtattggctagactgggttgagttgggatttgcaagtaaaaatagccttactttattgagtatctagtgtatgccaggccttatgtcaggaactttatgtgacttgtataacttaattctcacaacaaccctgtgttgtagatatgagtgtgaacaaaggagagaataggttcaaaatagctaatgccatggcagcccatagaagtttggagctggatatagggtttggggctgaggaggcaagagttacggcctcaggcctataaaaattgggggagctggaatggaacccttgcataaagcccagaaccttaaagagcttcctgttcagagaagggagatgagaaactctgtttactgctttggagtcaacagcaaggaagtgttctgtgtgtcctggggcttgctgtgtcacctttgagagagcaaaactctcgggctgtatcaaccacatgtgtggcacctgaattcatactacttgcatactataggaaatttaggataacaattaacataaaaatgaaatctaagacattgatagattaatggataaagaaaatgtggtgtatacatactgctgtggactgaatagtgtgtggaagcaaattcatgtgtggaagccctagcctccaatgtgatggtatttggggatagggcctttgggagttgattaggttcagatgaggccaggaggtgggccttcctgatgggattagtgcccttagaagaagaaacaccagagagcttgctctcactttctccctgccacgtgaggacacagagagaaggtggccatctgcaagccaaaaggagagccctcactagaaatccatctgctggcaccttgatcttggagttccagcctctagaactgtgaggaaataaatttttgtttcttaagccggctagtctatggtattttgctatgacagcctgagctgattaagatacatacagcggagtattattcagcctgaaaaaaagaaagaaatcctgtcatatgctacaacggggatgaaccttgaggacgttgtgctaagtgaaataagctggtcacagaaggatgaatactgcatgatcctatttatatgaggtatctaaagtagtcaaactcttagaagtagaattgtggttgccaagggctgaacgaggggtgcagagggggttgttcaatggatatagagtttcagttacacaagatgaaaaagttctagagatctgatcacaacaatgcacatatagttaacactagtttaactgtacacctaaaaacgcttatcgtggaagtcggtgtggcgattcctcagggatctagaactagaaataccatttgacccagccatcccattactgggtatatacccaaaggattataaatcatgctgctataaagacacatgcacacgtatgtttattgcggcactattcacaatagcaaagacttggaaccaacccaaatgtccaataatgatagactggaataagaaaatgtggcacatatacaccatggaatactatgcagccataaaaaatgatgagttcatgtcctttgtagggacatggatgaagctggaaaccatcattctcagcaaactatcacaaggacaaaaaaccaaacgccacatgttctcacttataggtgggaattgaacaatgagaacacatggacacaagaaggggtacatcacacaccaggggctgttgtggggtggggggaggggggagggatagcattaggagatatacctaatattaaatgaagagttaatgggtgcagcacaccaacatggcacatgtatacatatgtgacaaacctgcacgttgtgcacatgtaccctaaaacttaaaatataataataattaaaaaaaaatagttaagatggttgtcttagtcagtttggctgccataacaatttaccatagactgggtggcttaaacagcaagtactcatttctcacaattctggaggctgggaagtccaagatcatggtgctagcagatttgatatctggtgaggacctgcttcctggatgactgccttctcattgtctcctcactggcagagagttgagaactgaagagctctctcatggctctttctataagggcacgaatcccactcatgaggaaccatctttatgacctaattacctccagaaggccgcacctcctcataccatcacactgggagtccagtgcttcaacatataaattttggggagacacaaacatttagtccataacaatggtaaattttatatatatatttttgcctcaataacaagaaccccacaaaactagatctaggataactgatacccataggacccttcaaaaataatcacaaaaactctgaagccttcttccacagctcaggacccttcagacttttataaaataagcagtccaggctgaagatgagcttacagtaaaaaataatgtacacctcacaacagagttgaggaagagtcagcagatataacaaacagaattactaccttgaaaactgaagtcacaggacaatttgaggagaatataaaataaccttgtttaggctgggtgtggtggctcacacctgtaatcccaacactttgggaggctgaggcgggcagatcacttgaggccaggagttcaagaccagcctggccaacatggtgaaaccttgtctctactaaaaataacaaaaattatctgggcatggtggcacacacctatagtcccagctccctgggaggctgaggcaggagaatgttttgaacccaggaggcagaggttacagtgagctgagattgtgccactgcactccagactggatgacagagtgagaccctgtctcaaacaaaaaacaaaaacaaaaaaaacaaataaaataaccttgtttaaatcaaagagatggccgggcgtggtggcccatgcctgtaattccagcactttgagaagctgaggcgggtggatcacgaggtcaggagattgaggccatcctggctaacatggtgaaaccccatctctactaaaaatacaaaaaattagctggacatggtggcaggcgcctgtaatcccagctacttgggaggctgaggcaggagaatggcatgaacccgggaggcggagcttgcagtgagccaagatcgcgccactgcactccagcatgggcaacagagtgagactctgtctcaaaaaaaaaaacaaaaaacaaagagataaaggaagaaatagaaagcataataaaataatagtgctatatgaaaaaggagaagatttttaaaaagggcccaactgtatttttagaaatgaaaaacacatttaaataaataacttaatggatggattaaacattaggttagatatggtagaaggtaatatcagtggattggaagttagatctgaggaaattgcatagaatacagcccagatattaaaatattgcatatatgaaggagccattgaaagaattggtggaaagaatgaaaaaggttaacttacatctaaatggagttctaggaaacagtggagagaatgatgaaaaggcattactttaaaggataatgccaagaatgttttgaaatttaagaaagatattgatttttagattataccagcacactgagtattgagtagggtaattaaaaatacatctcgatctagacactcagtgtagaaaactgcttaaatgtcaaagaaaatcttaaaagcaagcagggagaaaagacagattatttctgtacaaacaccagacttcatcaaccacaacagacgccagaagacaatgaaataatatcttcaaagtgctcagtgaatatcaaactagaattctatacaaagctaaattatcattcaagagttaggatggaaagacatttttcggccaggtgcggtggctcacgcctgtaatcccaacactctgggaggctgaggtgggtggatcatgaggtcaggagatctagaccatcctggctaacacagtgaaaccccgtctctactaaaaaatacaaaaaattagccgagcatattggcgggcgcctgtagtccccgctactcgggaggctgaggcaggagaatggcgtgaacccgggaggtggagcttgcagtgagccgagatcgcgccactgcactccagcctgggcgacagagcgagactcagtctcaaaaaaaaaaaaaagacatttttcctataaacaaaggctgagagtatttacctctaaagtgatctgtgctgagagaactaccaagggacatgcttaataaagaagcattaattttttcatgaacctggcattgcaaatgtattttttttaagaagattaagatttaggatgattgaaatttaggatggggtgggtgcaaagatcagaatttaatgtgttctaaggtcttggtatttttcagggaaataatgaactattatttgaaatatttcataattcaaaagaaagcagacagaaatacccagacattgacctttgggcaccatcattatcactagaataacaactaatatatgcggagttcttactgtgtgccaaggtcttttatgatgttattccatttaatctcacagcaaccgtatgaaaaaggtaacgctgccattttgagaggtaagaaaacaggggggacaggggggatattcacttcagtgctgccatcactgagggtaacacacagcaatagtctgtgttccgtgaatgtggatgaaccaaaccaagctgaggttaaactataataagcaccttgctcgtgtcacatgttagagaagtgatgaaactgtggttctaactcaggcctgtctagcctgagactccctgctcttttccacagtgtctgcccctcactgtttccttctctgagtagacgagtcagacgctggccctgcacttcctgtgaattaatgccccgcttttcccctctcacacatgctttggtctgtgtgacttgtcccattcaggccctgatgtcctagtggtgtctttccaggtgtcatacagcccggcagcgtctcctgcatccttgctttgctttcaacaagactgggccggctgtcgctccccagtttctatgtggcagtcagacaacaccccccgcatggtgttgctaggaaatgcaggagcgatcatagcatttggagcaggggccctctctcctgcctcctgtacacacctgcctttaccatctgttcaggatgctcctggcaccttgaccctgccacactgagatgctccacctcattctagactgtggacctcagagcttgggttttcttaatggaggaattatcagggagaaaactggagcctggggttgctaagctacactggaccctgttctagtcacacactggagaagaggtgctgagagtgggatgtcttgcgttcaaggaattttcattcagtttcctatattttcaacaaaacgcctatctctgctcaagtctactttatatcgtatatttatatatagatatgcacacacatatgtgtacatacacacactgaataattaactcgttacgcctgtgaaaatagttttttggtggtgtttgttttttgcccctttggttcgtttaatcatggactgtgctgtttggtttcctgaattgccagttaatttcaggctaaggcagttaatcaggtagtcccacatggcctggcttgaacatagaaggaacagggagctctgatgcatttaggttctgattactggcttctcacacactgtcatcattctttggagggtttttcttgacctgagctcaaatcattccataccaaagggattcctgatttaaactgtcagtgttaaaaggcctggtggacagatggtgtcttacaggcaaacaaaggctcttggcttgctgctgatggaagccatggactcctccaatttctccttttcccccaaagaggccctggccgtagatcccagcattgccaggcagcctgtgttgttgaggactgtgtcctgtgttttggtggccaagagcatttcgactctcccaggggtgtgccagaggatcaggctatccctttcttagggacacagttgaggtgggtggaaacagcatgtaccttgccattggagaagctgggtttatgctgtgattcacccagccatctcaggttgtgctcttgggagagtctttgatcctcagtttccccagctgtagattggtgatatttgtctccacattgtaaagagaatttatgatactgaagaaaatgctgtgtaaactttaaaacaatacaaatgtaaggcattgctactctcagtgcttggaggatgttttgtgggaagttaatggcccttgctctgccatatttcagtgccaagaaccacaagagctgtcaataaatactgatgaatgatgagggggagaagccatttgactctgtggaagccagtgctttatatattaaatgcatgtattcattggatcattcattgagcaaatatttattgagttcctactaaacacgaggcactgggaataaaacactgaataaaacaagtggaatcatgactaatgtttcctctggctttcacagagttagaaaaattaggtgtgttgttttcataaaattaaattattctatatatataaaggattttaaaatgctgatagtatatctgtcctcctctttggtattaaaatgtctcttcttttgtgtgatgatggtgatagttgatttttgaaaaacttttcacatagtcaaatttgaaaaggtgttgttagttgtccttgaaatccagcttggggatgactgatctagcccaactccccacccagggcaggcctgtctttagcattctcaacaagtggtcatctagtttctacttggatagttccagggaaggggacctcactaacttcaacacgcagccattcaaatgttaaacagccattatcttttgagtgttcttttttatattaagtggaaatctaccatcctataacttctgctcatcaagcttgagtcctccatctggagcaaacaaaatatatttacttcattttcttatagccctccagatttttgaagcagactattatgtttcttccaagcatattttccagacttcttgtccccactttctttacccacgttctcccgtggcttcattcctctccctcttgccccacctctgctggtcagcttctacttgccagtgttcctcttgcagtctgttccccagaagggacacagggcttcagctgtgtgccgacttggatggagtgctcagcctgctatgtccctgattcagagctctgaatgcagattaaggaagaagtaaagattgcgtttgcctttttggcagctgtgctctactgttgactcatattgagtcgtagcctactaaaatccctagggtccttgtcatataaattgctgataaggcaagccagggttccacctaccctatgtttatgcagtgaattttttcatctaagtatagtcctttacattgtgcttattctatttcatctcgttagtgtggaccatagtttcagcttgttgaggtcatttttattctgactgaaacttccaatttactagctattcctcccagatttgtgtcagcagcacatttggcaaatttgtcttcatccaactttttaatttagtgttcaaaaggctagagccaaagacagagccttgggtcacatcagtagagacctcccagggtaaatgtatcagtgagtcaatccctaggcatctgtgcatagaatcagtgcacctatgaatgtgtcaatcatcagtgcatctctggatcagccaactgcagaccctcctgagtgtattaatcacactggtgatgtgagttctattttcagactcttctacttctcattttttaaggcaatgtcaaccttttccattattgaaccaccattggtaggattatgactttcaaatttaccttttcagcccagatatctgtctcttttacatttttaattttttaattgaatagctgcagaatgttttaatttttcaaagtaaatgcactatctccacgtcctctgaaaccttcttctctttctgtgatcaacttggtgccaccaagttggccaagccaggtacctggaagccattctcagtgcttttgctttcttctcactccacagctaattcaattgagtggggtaattataaatacccttagctgttctaagagattctacctccttaatacctcataatacacccctcggactctgatccgtcttgcctatacaactgtaagaaccttctaactagattctgtactcctggcctgactccttctagccctcatcctgtactgtgtcaccaggaaacaaaagcctcactcagattatgtcagtgtactgcactgaggcctttgctagcaccctgtccactgtaaatgataggtggtcctgcatcgtcttactgttctcagcttttactgtttcttctaccaaccctacacttcagatgtactgtctactgctggttcccaactgcagcatgtaaattcatgctttggatatgccgttccctgtacctgggatgcctttcactccttctagtcaactgacttctactgcttctttaggattcagatcaagcatcccctcctttgggacttcttccgcagatgcagcgggttgggcatcccttttcagcaccactgcagcactctaagtgtacccattggaaaactcatcactacatggtagactgtttgtctgcctctcccacttggtggagggcccttgcagggcaatgcctgtgctctgtttaccactggagccacagctcttagcacatagtagtaggcacttgggatttgttgaaaaaatggatgaatggaggatttgacaaatcatttccaatttgccttgaactgagtgaccattacttcccttttagcattactctatgattctgcatctgtggcatccctttgatgtactggccatataattccattcaaaaagtgaaagtgtacttgacattgattaggttttttctccatatatgttccaagtcatccgatttctaatctattctaggcttgttaaactccatttttaccacttagttgcatgtttgtttctctgatcctgtattagttagggaaggctagcagctgttacaagcagcccaaaatctcactggcttgatgcaatacgagtttaattttcagttacgtgacagtccagtgcagttactcctggtcaggtggccttccacatggtgactcagtgagcatggtccatttcattctgcagggcttctctctttgtggtctttgacgttttctccattcagctaatgtatggagaaagagaagcaattgcaggtgaggaaacagagggatggtgcgtgggagcttctcactggcccggcctggactagcacaccatcacttctgtgcacatttcactggccagaacttagtcatatggtcatgtctgactgccacggcagctggaaaatgtaggctagctgtgaccccaggaagaaaaagggaacacagatatttgtgagcatgaacagttgccattgcacccattcttagattctggacctcgtgattcccagggctgccttccagagctcttcttagtcagggcattttctgtgctccaagccctttgatcttctatctcccaggctgggtttttttatctctgccctttgcctctctgttctctcaagccctcttggccattggtacctcatttctcttttcttgctggcctgtctgatcttgactcctcatcgctccagtttcccagcagctgatcctcacttgctcacgtgtctgggactggaccatctgattcttggtacctgcttgccattgccagatgtgttcctcagggacagcccatcccattccaagtcctggcacaatgggggagagtcctttcactctgtcctgtgctttgaagtccttcctatgagtacagagtatggatttgaactctgtttttagagataattagagaactgagggagttacagtgagagccactgggagatgtgggctttgggaagccaaaagtatccatgctgtatgtcctgaagcagataagcctgaagttaatggataatctgtacgtatatgtagaaaaattgcaaaggtggtgatgctagagtacatgtttttttgttactctgaaaaagaagaaagtgtcacattttagtgtgagaattttaggtaagagacaaagaaaaaaatcataaattccagaatttgggatgccattatggagaggttaagtaatgtgctttcctagaaaaaaatgggagtggaagagcccatctcagaaggctttgcagtgacctgctgggtggcaggagatggataagcaagctcaaaatctcttcttctgccatgattctttgaaaaaaataaaaaagctgggtgttctgcttttgactctgaccttgtttgagagatgctcatactgaacgtgtttgtctctgggtaatggttccggatgattttgtaaatggaacgggtattgtcttgtaaggtttcaggaactatgatgcctgagttccattacctgttttgtcacccactcattctgcaggttactcacttgggtaggccacttctccattcttttgatggtctgcttatctattaagtgggaatgggaacaggatgaattttcaggaggtttgaatgagaagtaattcatgtttctaacacgcttcagaatacataagtacaacatcctatgggaattcaaaatacaattacacttttgttaggtttatttctccgtatgctggttctttggttcttgccttgagacatgcagctttttgcaaatgctgtttcctagaaatagctctttaaatgtgtgtgcctctcctagtgagggctgaaatggtaccctctgctgggttggaggctggggaggaaggagaggaggctgaaagtcaacaccctcaggccagggccctaactctagaggccgtgaacacggtggttagagcacgtactttgctgtcaggctgcttggtttgccggaggcttggcacaagctggttagtccctctgtgcctcagtgttctcatctgtgaagtgggcgtcataataatgcctaccttatgggggtgctgagaggattaaataaatcaatgtatgtaaaatcatgagaacagggtctggcccacagggagtactctgcaagtattaactcttatttttaaacaggtattttagaaagatgctttgcctcagatgcgttctccttggttacttgctgacgaaacaacctcctcccatgtatctgaagggcctcagagcagccttcgtgcttgcagacatgcggagaaggaccttcccactgtcctcgggtgggctcagcttacgttaagagatgaccatcaacacacggggaaagcaatttttcagttcataggatttagtcggactggttactatatgtcactgcagcgtggagggaatatcagaggactccactgcattaggcgggctgggcacttgcttgccgttgatattcttaaatgaatcacgttgttaaatgcggagggagggctgtgcgcgcagacctatattcttacttctgggagaccctgtggggctctgagactttgcacttcttagtccaaccaacttgaagtggtcccttgctcccagtgattcattctgcttttactgctgattctgtgctcttgagggattcatggttcgtgcacacgtggaagggtggggcagtgggtaaaggagtgacattgcatgagtgtatagacaatagctgcactgtgtcacttacagcctgggcttcttccgtaagccctaaaccacccctgtctgtccccccgaccctgaggtaagccattgatgtgggggcgagtggtagactaagcatccctttggaagaaaaggattaatttgcatgaagctaggaacacacttttgaaatattaaatacaacagaggtctgctgagcacctcctatgtgtaaagcaccatgctggacgccgtgcgaggtacttggagtagtaagacttgactcctgtcctcaacgagctcaagatctcttgggggagacaaacacaggaataaaacaggttgtgatgaacatggcaacagagcgtggtgacaggatgccataagaatcttggggctctgccgggcccatccggggcatgttatgtacccagagacttgacattttttaatttttaaaaactgtggtaaaaagtacgtaacacagttttcaatctgaatcatttttaagtgttacagttcagtagtgttaaatatattgttgtggaacacatctccagaactttttcatcttgaaaaattgtaactggctgggcgcggtggctgacacctgtaatcccagcacttggggaggctgaggtgggcggatcacaaggtcgggagatcgagaccagcctggccaacatagtgaaacccctactaaaaatacaaaaaattagccgggcgtggtggcaggcgcctgtagtcccagctacttgggaggctgaggcaggagaatggcgtgaacccgggaggcggaggttgcggtgagctgcgatcatgccattgcactccagcctgggtgacagtgtgagactccgtctcaaaggaaaaaaaagaaatgaaaaattgtaactacacacccattaaacaactccccatttctccctgcctccagcccctggcaaccaccattctactctctgtttttatgcatttgactactttagatacctgatgttaaagtggaatcattgaatatttgtcctttgtgactggtttatttcacgtagcataatggactgaaagttcatctgtcttacagtgtgtgtcagaatttcattgcttttaaaggctgaataatagtccattttatggatagactactttttttttttttttttttttttttgagatggagtcttgctctgtcacccaggctggagtgcagtggcatgatctcggctcactgcaacctcggtctcccaggttcaaatgattctcctgcctcagcctcctgagtagctgggattacaggtgtgcactaccctgcctggctaatttttgtattcttagtagagacagggtttcaccatgttggccaggctggtcttgaactcctgacctcaagtgatctgctcgccttggcctcccaaagtgctgggattacaggcatgagccaccgtgcccagccacggatagattatattttgtttgtccattcttctgtcaatggacatttggacttgttattgtgaatagtactgctatgaacctgggcatgcaaatatctcttggaaatcctgctttgagttcttttggatacatatccagaagtaggattgctggatcatgtagtagttctatttttaattttctgaggaatcgccatacagttttccacggtggctgctccattttactttcccgccaacagtgcttaacgttcttattcctccacatcctcgctggctcttgttaatttctattttttgatagcagccatcctaatgggtgtgaagtgatagctcatggtggtttggatttgtgtttctctgatgatcagtgatgttggccatgtgtatatcatcttggagaaatagctattcaagtcttttgcccattttaacatcaatactcgaggatttctctttctgctctgcccatatcctcagatatcgggactggcttgcttctgcagagggggccagatcaaccctgcaccagcagaggcatagggcagcaggggcttctccctctgcaagtcccaaaagtatgcgggttacttgtccccattggccatataactagcacccctctggactgcttagctctgcccatcctgctgtttctaccttgcgatgatttacatggatgagaggctgggtatgttcatttcttcttgcttcagtattaatacattaccacagacttagtggcttaaaacaacacagttttattatcttatatttttgaaggtcagatgtctaaaatgggtctgcagggctgcaatacttctggaggcacttggaagactgtttccttaccttttccagctctagagaatgcccacattccttggctcatggccctctcctctacctgcaaagagaacaatgtagcatcttttgctctcctctcgtgccttcctcttccgaggacccttgtgatgacctcagacccacatggataatcccatctcaacatccttaacttaatcacattggcaaagtttcttttgccacataaggtaacttattcacaagtaccagggatgaggacaaggacgtgtctgggggtgatggtcattattcagcccacactgggcctctgctatgtggaaggcaggggtaagagcatcttttgtagggagggttcttattctgtgccttctggacttaaactttaccctgggttagtaggaacagcatctagggatctgaaggcttgggcttgactttggtttggctttgcctgggtgggaacctaggggacaagaggcttgctttctctgagctcctgtgacctcaccttttaaaggaggtgggtgggccaggtgctctttaggtccctctcgctctgccatatcctcacctgctctcatttctcatgtggtgtcctcacattgccttttcccattggctatggagagactgaggctgccctgaagggtagaagaggaaagttatatgaaactttggggaaatggctcctgggcaccagctaattcaaaggaggacaggaatagcaggaatgaagggcgcgaaggcactgctttattgcccgcctccttcccccagcccctacataaagcatccttggaacaaacaaatggaaatactgcacaccctgtaagcctaattgggtcatacataacttgtacagtgatttcctatgaaacttcaattagccccctcttccagttcaaacctgataagctcaaatatttgtaaactgccagccagatggaagatgtgtctccttgtggcttggatatcctgtaactcaatatgtgtggtgactggcatgggcatccgtattcaaggaagggaaggagcctcgcaccctggacgtggcattgaggggcaagaaaaggtgttgtttgttctctttgggacaggtggcccgactctcctctggagcaggctgggagaagttgccaaggacagttggcgtccttcagtggctggggaaggagagggtgactcttgggtccttgtgtcattcttcatcacttccaactcaagggagaatgttgacttgaaatagttaacctttagtaagcatgcattagtattaatgcaccctatttaatccttattatattatccctgttttaccgataagaaagctggggatcaaagaggttaagttaacttagcaaagatcacatggtcaacaagtggagagctgagactcaaatggaaatgagtctcatgtctaattaaatgtcgaatttcaaaatgcatctctttctactatgccacatcatatcttctggcctcttcccttcacctaaaaccattgcccttgggagtggaatgtggagctgtgaatgaaggaggaggcagtgagccacagcctggaggaggtgacggctgcaaaccccgcactctggcagaggccagtcaaccgctttggaatgccaggctgcctggagctaactgtgggccaatcttgtgttggccactttcgtttcaggcccaaatttagttacagagtcagaaagagcaaggcccctggcagggcaaagttaccagagagtgtacgtgggtatgtgtctgtgtgggtgactatgcagtggggcctctccttcccagggaggctagtggcttcttgtggcagggtagtatcttacacagccgtgcctcccactcccctgtaccagtggagcccctggtaggcctgcaccctgatgcttcttgaccacttgtcctatgctaggcattgtgaggccacatagtggaatgagacaggactctgctctcagggttatgttggagcaggaggagaagttacatggatataagaaaggcagtgaccaaggccatgagctgcacagatggaagtgggtatgctttgtgcctccgtgttccacgctggcaacatgtgttcgtacctgtactcgtgtacctgcgtgcatgtactcaagggtgactgtggggtcatgtgggggacttgcctcctgagccccttaccctgggcaggtggtggctgctcctttccctcatcgcggagcactttacacaactgtatgatcatgggtgatctggggcccatgggggcagcttcgtaactctttggctcaactgggaagttggagcaggtatttgctaccctgagtgtgagccctaagaccatagttttatgctggaaaccgcccctctttcatgacactcagtgcctagtgcctgcagttgcaggctgccaggggaccacccaataacaaagctatgttgaggccatctgtgtttcgtgctgaaaggacatttttcttcagcagcatactgagtgcatagagcagaccaaagcagacatcccattttccccagtaacctccgcatgtgtgaaaactgggcagctgtcaccttgagaaagatgctgctgggtcaccccaaagattccacatacatgctgttgggtgcctccttgtatgtgtgtagctgttattagccccatttcacaggtgggaaaggcaaaggcaggaaggctgccaaagagcctggtattcaagggaaatgaatgagcaggcagttgtaatctcagtggcatcccactccacaatctgaagtgcatccccaagggttagggagagcagcttaagaaaccagcagacatttcagaagctgagccctatggacagtgcacatcccatgctcaaggagttccggtggtcctagcccattagccacgtttgttgagactcagcggagcacccccagtaagtggctgccctattcaggagtacttttcagattcaagtctttatcaatattaagggaggaaattcaggggtggaggtgggcgagcaggggcctcctctcttttgggaagcctatttctttggccagcatgtcctgaatgataaacttctccagcacccactagtgaattgcagaatcactgaatgccagaaaagtgcataggaccttagaggtcatttggtgaacaccctcagtttacagatgaggtgactgaagcacagagagggagataaacttgtctagagtcacacagctgcttagtgggaaagggaggaagagactcatgcattcagccccactcaaaaaagtgactcaagagggagagccgaccaggaagtgggagtggctgggactgtctgtgcttcaggggaaatgttgggggttgtgaaatgcagccactctggatggggccatgctggggtgcctacaagggccttccaggtgctcagcccttcctgtgcctctccttcattgctgcaggccccaggggctcaaccccctttaacaataacaaaatgagaccatttaatgactacttccccctgagaacttagtcgatggctgcaccatgctaagtgcttataaatgtttcaagactcttgtcacaactcagagatatctaagtctcagaaacgtaaataagttgcccgggctcacagggctagtaaatggcaatacagacgggaacttagggctcctgcttttgctgttaaccaccagatcacactatctcttcttggaggtggctgctgtaattcactcaatgtgcttgcagtcctgtccccataaaactcagtatttctagatcctgcactcccacctgtccactttttctttcctgtcttcatagaccagaagcaggtccaatttgtcttaaaggttatgaccctcctaattcctgtggggacacagacagaggagaggaacagagatagggggacagagtcacagagatgatcgagtgttacagcgtttttacagctctaggttctgctctgtgaatcctgactccattctgagatgaaaaatggtagtgccattgacttctgccttctgctttcgggttcttaaagatggacttctcctgacctccccttcttctcccttttggcccagactttcagtgcagttgaggctgcgggagaatccgggcagcactgtaagtgccctcggcccgagtcaggccatccagtgtttcgccagtccttcaaggaccctggaggagaagggctaggcagggtcggataccactggctccagagagtgtcagaaaaacctaagcagaaagaagagaagggggagtgcaggacataggaagatggcaaacagacgcccacagaagaggagagtgcatgcatcctatgaggacggagcgtggatttatgatgccagagaaactggaaggtttaggagtggagaggtcagtcttagcctgggtcccactggatggaggctgtgtgcttctctctgccttggtttcatcattcaccatcattgggaataatgtcttttgtctccttacttaaagtgatcaggcactgagttgaaatcagcattccttcagcaaacacttcttttcatactggctgtgtgccaggctctgggctaggcacagagccacagagatgagcacgtcatggcctgccctggagatactcacaggtgcccagagtggagcttttggacaggactgaaactgtgcagagatgaggggttgatctaacttcccatcaaaccagctctcgcagccagaggtccgatgcctgatttttaacggcgcttgagaaaactgttgatatatttgaaggtgagtctggttttactcagttgtgaaggcatgtttgtgcatgtgcacatatgatttatttgatatttgaaaacaatttatgaccagaattctttgcatccttctctgggcctatgtcatgtgctgagggcttgccggaagcacttgtatagggtagagacttgtcctgccacatatctctcctctggactggcctaaagtctatcctcccatctccttcctgaaggacagcttccaaatgccttcccctctggttcttttcctgaggacagacctctttctctttcctcttgggatgttcttccaagtattctgagtctctttggctttttaaaacacattaaattgaggtaactttttgttatggtaaaatatatgcaacataaaaattatcattttaaccattttaagtgtacaatttagtggcattaagtacgttcaccatgttgtataaccatcaagcactatctgtctctagaactttttgtcattccaaaccaaaactttataaccattaactcccattttctcttcctccccagccctggcaaactctattctactttctctctttacaactattctaggtacctcatataagtagaattattcaatacatgttcttgtgtgtatggcttacttcactcagcaccatgtcctcaaggctcatccatgttgtagcctgtagcagtattgtattctttttaaggctgaataatactccattgtatggatagaccacactatgtttgcccatccatttgttgacggacacttgggttgtttctatcttttgtctctttggataatgctgctatggacatgggtgtacaagtatctgttcaagtcctcgccttcaattcttttgggtatatacccagaaatggaattgctggttcatatggtaattttatgtttaatttttaaatttttatttatttatttttttgagatggagtcttgctctgtcacccaggctggagtgcagtggcgcgatctcggctcactgcaagctccgcctcccaggttcacaccattctcctgcctcagcctcccgtgtagctgggactacaggcgcctgccaccacgcccagctaatttttttgtatttttagtagagacggggtttcaccatgttagccaggatagtctcgatctcctgaccttgtgatccgcccgcctcgacctcccaaagtgctgggattacagatgtgagccaccgcgcctggccacatttaatttttttgaggaactttcatcctgttttccatagcggttgcaccattttacattccccaccagcaacacatgaagtttccaatttttccacatgattgccaatacttgttattttctgattttttcgataatagccgtcctaaggggtttgaagagccatctctggctttgaggatttccatgtaaattacagtgagccgccggggctctctgtgtggctgttcctagctgggggccccttgggttgagcttgccctgtaagcacaggtagattggaggcagccgctcagcatagctgagtgtgctctcaggccacctctgcagctgggagagcccagccatgggcagagcggggtggctgctgggctgcacctggttcagcccctgctttgagatcagtaggggaggagatccaggcaccagacaactgggagtgggggatgaggccggctggagaggctgaggggagcagtgagatgtctggaccaatgagttctagaacctgagctgtctgaactagaaggacctcgtacggtatctggtggagcctcctcattctatggaagagattgagagccagagaaggaacgtgatttgtctgagtgcgcagagcaaatgagtgatgggcctggggctggaattcagatttactgacttctggcctagttcttttcccaccgaacttggggaggagtcaagataacttcatgtctatatgaagtttgatatttaccaaggaatgacagcctcaggggagacttgcatattttttcgttgccttctaccttcttgtctgcctgctgtctggtggggttttgtagggattaatcagataaatagctttgacttttctaaatgaaagaagcattgtattttatacaaagcattgttattaaacggcctgtgagtgtgtagaaataagctgatgctgtttcttttgtcgtgccttagtgagaattagagacttccaggagtggcacaaataggctgtgtgtgggtacatttgtgtatgtaatgtttttagtgtgtacatatgcagggtgacccaccttccccatacagtgcgatcccctgacaatggaagaatttcagagccttttactaatagaggatccttgaggaatgcagcaccattttcaaggatctctggaattctgtgttctgaattatctggagagatccattaatatctgtgtatgggatatagcgattgtttttaagagttggttgcttaacatggaaaatgtgcttctgggaaaaagagttttaaaaacccagctttcatgttttattttacttcattgaaatgaggttcttcttgcgtgccccgaggctttatctctggaatgatttttactaaataattcttcatattcaggtagtactttcatagacataatcccttgtagtcttcaccattgttctgtgaggggtgtggtatcatctcagttttacagatggggacattgaggcgtggagagcatgtgtcacttggcactggtagcactgctcaccgtgtgaggggcggccgtagagctagggcctgcttgctgaagccacgtggctgtgtggctggggaagccctccctccctggaacctggttctgaggttatgtgcatggtgcactctggaccggggcttagtctcgctgccgctcactctgggcgcatagccctgctcatgcttcatggaggcgagcagataggaaacagaatggtttttaaacaagacgaaaagaaaaaggaaaagatgaagagaaaaaggaaaggatcttgcccatgtttctcagctaattttcaaaccaaccgtcttactgtgttactttaccctgaacctagatccttctgcagagaaccacagttggaaacccaggagtgcaagtggccctctgtccagagcttaggctggagttgagacggctgccgagaggtgtgctgagttcttatgggacttcttgcttctttctctgtggctgcagggagctgcctctgtttgcctgcagtgctggggatgaggaggaagtggcctcaggcaggttgggaggcaggcggcctgtctgtccccttccagaggcaggaatctggcactggggtggccacagtcatattggaagtatacttaagcaacaaaaccaaactgtaacttggttttctttctgattaccaaataattacttattgcacagaattttggaaaattaatcacaaaaatacctagtaccatttattatatattgtattttctcttactgtggccacgccagtgccagattcttgcccagccacggacagtcccactctggaagggggcagacacgctgcctgcctgccaacctgcctgaggccgcttccccattacccccagcaccacagggaaacacaggcagctccttgcagctctgtcctgagagtgtgatgttcattaactcatttgattgtcacacagtgctatgagataggcagtgttattatctgctttttacaagtgaggaagctgaggcacagagaggctaggtaccttttcaagtctcacagctagcaactgacagaggctcgaatttggatccattctgcctggtttccaggtccatgcccctgagtgccaggctgtactgcctctcagcacgtgtatattacctgacacttaaaaataacactagtgtttccttctagtatttcttctatgaaaacaaacataaaattggatgggggccgggtgcagtggctcacacctgtaatcctagcacttttggaggctgaggtgggtggatcacctgaggtcaggacttcgagaccagcctggccaacatggcaaaatcccatctctagtaaaaatacaaaaattagctgggtgtggtggcacgtgcctgtaatcccagctacttgggaggctgaggaaggaattccttgaaggaggttcaaggaattgcttgaacccgggaggcagaagatgcagtgagccaagattgcaccactacactccagcctgggagacagagcgagactccatctcaaaaaaaaaaaaacaaaaaaaaaaaacaacaaaaattggatgggagcctgatgcaggaggatcacttgagcctaggggttcaggactggcctgggcaacatagccctgtttctaccaaaaaaaaaaaaaaaaaaaaaaaaattagctgggcacggtgactcatgcctgtagtcccagctacttgggaggctaaggtgggaggattgcttgagcccagggaggttgaggctgcagtgagctgtgatcacggcactgcattccagcctgagtgacagaacgagactgtctcaaaaaaagaaaaaaaggtcgggggcagtggctcatacctgtaatcctagcactttgggaggccaaggtggatggattgcttgagcccaggagttggagaccagcctgggcaacagggtgtctctactaaaaacaaaacaaaaatctgaggtaggaggatcacctgagtctgggggagtcgtggctgcagtgagccgtgattctgccactgcagtctagcctgggcgacaagggtgagacccatctcaaaaaaaaaaaaaaaagaaaaaagaaaaaaaattgtggtcccattgtatatacttttgtggaccctgtttttgcttaatattagactgtggaaacaatttctgtattatttcatatttttcaaaatgtaattttcatggcttcctaaaatgctgtcagtggatgtgcattgatttctctaaccatttctccagtgacgggcttctaggttgtcttcaatttggtactggtatcattcacaccgtgacgagtacccaggcgcagagctttgccagactcttggattagttctctcagggtagctcctgagaagggtggtgaatgttggaatttcttaacaactcccaccagagtgctgaactgctgtcctgacagggtggagcagaccacgcttcccccgggcaaagtgcaggaggctctaggaggggttaggggctcaacctccccctcccaggtggggctgtgggagctacagctccatcgtcgtcctcaccgtgcagaacagaaatgcacgctccgcctccctgagtgtcaggcctgtgggtccgtgagctccgagcctcaggagtaggggcagcctctgctgcagggaccactgtgccatcccactgagtcccgtgacccacgaggctgggtgttcagaggcacgaggtggagtgcgagcaggtcctgccggttcccaagggtgcccgcccagttcagtgggtgacagtgaatgcgcagggtgagtgaggattagctgagggagccattctctcggatggtggcagaaggaggctggggccaccgagaatactaaaaactgccctcacaaggtcgctgcctcctgtgttctagttctgctgcctgggaaagctgtactcaccctctgcctctgccctcctaccaataaactgggccagagcaacagaacccctgcatcatgggaccaaagtccaagtaattactattatggggaaaaaagccttgggacagttacgttttgagtcatccttttattcaacacattggtagtgtgcacataccacactccaggctgccctgggctctgagaatacagtggtgcaaaacaaaggctcatgcttcctgggacttccctcctgttgggaacaagaaacacatattcatttaaccaatgataatagatacattgaacatatggcaaacatactaatttaaaataacggaagagcatcttccccgtatacttctgcacggaaacctttgaaggccaaattaaagttctgtaaaagaacttccatgcagccaatgtgttttgagtgcctcctggcaacactgtactaggatttgaggccacagtgctgtttcctgctctcaaggagcttgtgagttgctgggaaaataagagaaggacccaagtattagactttaactcatctcaggcgttcagcagctgaaggaaaggggaggctgagccagtgtctgggtcccctcagtgtggtacctggctctggggcattcttccccactgtctgcacaccctcccttctccccagacatcagcaacctgaaggatttctcctttttgtagatggctgtctgtcctcaggcaggcagattattttttattttttttaattacacttaaattctggggtacatgtgcagaatgtgcttgtttgttacataggtatagacatgccgtggtggtttgcttcgcccatcaacccatcatctacatttgtatttctcctaatgctatccctcccctatccccgtactccccgaaaggccctggtgtatgatgttccttaccctgtgtccatgtgttctcattgttcaactggccacgtatgagtgagaacacacagtgtttggttttctgttcttgcactagtttgctgagaatgatgttttccagcatcatccatgtccctgcaaaggacatgaactcatccttttttatggctgcatagtattccatggcatatatgtgccacattttctttatccagtctatcattgatgggcatttgggttggttccaagtctttgctattgtgaacggtgccgcagtaaacatatgtgtgcatgtgtgtttatagtagaatgatttataatcctttggctatatacccagtaatgggattgctgggtcaaatggtatttctagttctagttccttgaggaatcgccacactgtcttccacaatggttgaactaatttacactctcaccaacagtgtaaaagtgttcctatttctccacatcctttccagcatctgttgtttcctgagtttttaatgataaccattctaactggcatgagatggtacctcattgtggttttgatttgcatttctttaatgaccagtgatgatgagctttttttatatagttgcctgcataaatgtcttcttttgagaagtgtctgttcatatcctttacctagtttttgatgggatttttttttcttgtaaatctgtttaagttctttgtagattctggatattagcgctttgtcagatgagtagattgtaaaaattttcttccattctgtaggttgcctgttcactcagatgataatttcttttggtgtgcagaagctcttcagtttaatcagatcccatttgtctattctggcttttgttgccattgcttttggtgttttagtcatgaagtctttgcccatgccaatgtccttaatggtattgcctaggttttcttctagggtttttacggttttaggtcttaagtttaagtctttaatccatcttaagttaatttttgtataaggtataaggaagggatccagtttcagctttccgcatatggctagccaatatttccaacaccatttattaaatagggaatcctttccccattgcttgtttttgtcagatttgtgaaagatcagatggttgtagatgtgtggcattatttctgagggcctctgttctgttccattggtctatatatctgttttggtaccagtaccatgccgttttggttactgtagccttgtagatagtttgaagtcaggtagcgtgatgcccccagctttgctctttctgcttaggattgtcttggctatgcgggctcttttttggttccatatgaaatttaaagtagttttttccaattctgtgaggaaagtcaacggtagcttgataaggatagcattatatctataaattactttgggcagtatggccattttgatattgattcttcctatctatgagcatggaatgttttcccatttgtttgtgtcctctcttatttccttgaacagtggtttgtagttctccttgaagaggtccttcacatcccttgtaagttgtattcctaggtattttattctctttgttgcagttgtgaatgggagttcactcatgatttggctgtctgtccgttattggtgtataggaatgcttgtgatttttgcacattgattttgtatcctgagactttgctgaagttgcttatcagcttaaggagatttggggctgagacaatggagttttctaaatatataatcatgttatctgcaaacagagacaatttgacttcctctgtttgtatttgaataccctttatttctttctcttgcctgattgccctggccagaacttccaatactatgttgaataggagtggtgagagagggcatccttgtcttgtgccagctttcaaagggaatgcttccagtttttgcccattccgtaatctctgctgccacactaaaaaagttgaaatgctgatttttcaataaatgtgaattaatccttaactagggcctgtaatttagatttgctatcaccaggtgctgataggcgccttagttcaagtagcaagaggtcttgacttccttcctctccatgcttggaaataagtggaggaagcatttggttattatggcaaaaattatggcaatttgtcatcttcagttgaaggccgtggcttagctgtgtgtctgtcagtttgttttcttccctatggtctctgatgtcaatatgagagccctcgagtgccaagggcgttatatcagggtcctctcaccgaagcagtgttggccttgtggtcatcgcaggtggtttgcttccaggcgttccttacgaggcttccttttcctttctttaccttctttcagccagctgccccataaataacagagagcaagtgtggtttactggatcactagcaggtgtgaatgctgtagcttttccgcttttcccattggcttgggcctctgaagtgctccaggctctttgccttctccagccttcatgtagtcatcagaggcaggtgggttgtaggacagaaaagatacagttgtatttgagggagtactcgtcagttgggttggggagagagccgcagatctcctggcgccctcacggtctccttgttttggagcacatttgactgctgtggtcatggggcctgttctgggcaccccacctctcatgaactgtgtctgtagcaggatgggggagaggaggaccggcagagtgacagaatgctgctggaaatggtgtgaaaatagctcaggtaggaggaagcgcagtcagatgcggcatggcggcgggcgcatcgggaaaccactgggcgcccaccccggggagggtttccacctcagctgggcgtcctgaagccactgggtgcccaccccggggagggtttccacctcagctgggcatcctgaagccactgggcgcccaccccggggagggtttccacctcagctgggcatcgtgaagccactgggcgcccaccccggggagggtttccacctcagctgggcgtcctgaagccactgggcgcccaccccggggagggtttccacctcagctgggcatcctgaagccactgggcgcccaccctggggagggtttccacctcagctgggcatcgtgaagccactgggcgcccaccccggggagggtttccacctcagctgggcgtcctgaagccactgggcgcccaccccggggagggtttccacctcagctggggcgtcctgaagccactgggcgcccaccccggggagggtttccacctcagctggggcgtcctgaagccactgggcgcccaccctggagaaggtttccacctcagctgggcgtcctgaagccactgggcgcccaccctggagagggtttccacctgagctgggcgtcctgaagccactgggcgcccaccctggagagagtttccacctcagctgggcgtcctgaagccactgggtgcccaccccggagagggtttccacctgagctgggcgtcctgaagccactgggcgcccaccccggggaggatttctacctcatctggggcgtcctgaagccactgggcacccaccccggggagggtttccacctcagctgggcatcgtgaagccactgggcgcccaccccggggagggtttccacctgagctgggcgtcctgaagccactgggcgcccaccctggggagggtttccacctcagctggggtgtcctgaagccactgggagcccaccccggggagggtttccacctcagctgggtgtcctgaagccactgggcgcccaccctggagagggtttccacctcagctgggcatcctgaagccactgggtgctcaccctggagagggtttccacctcagctgggcatcctgaagccactgggcgcccaccccggggagggtttccacctcagctggggcgtcctgaagccactgggcgcccaccccggggagggtttccacctcagctgggcgtcctgaagccactgggtgctcaccctggagagggtttccacctcagctgggcgtcctgaagccactgggtgctcaccccggggagggtttccacctcagctgggcgtcctgaagccactgggcgcccaccctggagagggtttccacctcagctgggcatcctgaagccactgggcgcccaccccggggagggtttccacctcagctggggcgtcctgaagccactgggcgcccaccccggggagggtttccacctcagctggggtgtcctgaagccactgggtgcccaccccggggaggttttccacctcagctggggtgtcctgaaaccactgggtgctcaccccagggagggtttccacttcagctggggtgtcctgaagccactgggtgcccaccccggggagggtttccacctcagctggggtgtcctgaagccactgggtgctcaccctggagagggtttccacctcagctggggtgtcctgaagccgctgggcgtccttaagccactgggcgcccaccctggagagagtttccacctcagctgggcgtcctgaagccactgggtgctcaccctggagagggtttccacctcagctggggtgtgctgaaaccactgggcgcccaccccggggagggtttccacctcagctgggcgtcctgaagccactgggtgctcaccctggagagggtttccacctcagctggggtgtgctgaaaccactgggcgcccaccccggggagggtttccacctcagctgggcgtcctgaagccactgggtgctcaccctggagagggtttccacctcagctggggtgtcctgaggatttctctcgcttaggctggaggggaatgccagcttccccatttggccattgagaagaaagtcatctctcatttatgtgatgaaaatattagacactgaaaaaggacttttggtttctacattgttttttgggtcttagactctcttatgctttgaaaatatgtctttttgcatagggtggttaattcttgatcagaaaatccacccacccatcaacatctgaattcattcgctattgcctttttaaaaagttttcccacaattttgaattcagtgctctgctcgttatcttccccacttctcacatttctttgtcaccatgctcttcccacaaggactttgtcttaatacagcacaacctgtgttgcccagtgtgggcgcctctagccacatgtgactatctgaatgtaccgtaattgaaaattaagtaaaatgcaaaatgcattttgtcagacgtgctagctacatttcaggtgctcaggagctgcgtatgactggtagcaagggctccgtaatccagcctaggattatagagcatttctattactgtaaatgttgtattggacagtgttgctatagactggtctatatatctcagtcagggttcaggcctataacagaaacttctgtagccgtgtttagaggaaagatagtacaggaatttaggggcttatacaataattggaaatgctgcaagagcaggctttaggccgggtctgtgggaatgattcccaaaacagtgctgcagaacaggccccccgagggaactgcggttcgggtacaattatgaggctgggggacctggaagccactgtgccaagggctggctctgggatcacaccgccttatgcatgatccaggaatcaggaagccactggtgtggccctgccagccagatacctgcaaaatagatgcttccccacctgacgtagttttgattcagttcttgattggcaaaagttgtgtcaggaattctcgctccaagggaggttgggagccattgtgtttagccctctggcccctgcagtccagcggggcaccgtaggaggagggtggaagagctgctgagaccgcaagtttaccagcctcccacccaccacatggtgctcagcacacaccatccttccagagaggagtgccactggggttgagatgacagggcctcgggttatcgtctgagatcgagagacggtgtcctctctgttcacgtcctccagctatctgtgtactgcaatagatagggaagattaatggcccagctttctagtcattgggcctttagtgggtggagaaagtccggtttctgttccaggttgtctgcgatactcttaaagggaatgcaggccccttgtcactacagcaagatgacagacagcaagagccaagtgggcttctgggtgacatgttggcctgagagaaggcatttcctttgccctgcagagattgctcagtggtcaggactttagggagaaatttatttgcagttcttccctttctaggtgtgagctgcggctgctcaccctctctaaatcgatgtgggtgtctgtgtctacgaaggtggaggagtgacctgcttttgtgctcacagaaggcaccaaggccaagcagggtgactgctgctgaagcaggctggcagccccagaccttttcctactcacggctgattggggggtccctttccaatgccaggggcgttgggcatgtttattcaacggtggcatggaggcagggaagtggggagaacactggcagctagtgtttgagttctgcttgtttggagtgggggcttgaagaagggatcacctgagcccaaacctgaaacgtgagaagggattgcctagcaaagggcagagggaagaacatgaaggacattctaagtacatgcaaaggcactgcggcaggcaagagctgagcatgtctgaggcatgaaatgagccactgtgtcaggagtgcattggaccgggcccagaggggagtgaggtgaactcagagaagtgggccagggccagtctgtgcaggtgttgtaagctgttgacaaggagtttggattttgaagggatctaactaggggaatgacagggcccaatttacgagttctgtttttaaaaggtgactttggctgctgcatggagattggcttggggatggccaagagtggactgaggaaaaggtcagggtggctactgcagcacttgtgggcaagagataggtagtggcctggactaggatggagatcttcctcacaacccctttccttagaacttctcccccatggttacatccaagaaatcagtagaagagcatatggcttgagaataagcccattctttaggggtggctggactgactccagcagtgttccttctacagtgtcactgtagtccaccttcacctgtatcatgacagcattatcgttacagtccttagcaaactgtgttgagcattttctgggatatggccctgaatcaggtgcagaaatagagatggattaaagaaaaaaaaattgtttcatcactgaacaccttccaagtccccagcaccaagcccctcactcacaggggacacccaggaggcacatgccactgactcctaacttggactcctcacttggacccttgcagagcagaatgacacgaggctggccagaccgtgctggggtcctgccctcatcctggtccccagcagcagcacctgggtgcaggaggaggacgcagatgctgtcttcaggggagctgggccatttgacaggtgggaggcattttcttatgactggggatgaggtcactgctgggggcacctacctgttggtgtgtggcctgatctgcgaggcagctgctcagggccttgttcaggggtgggagcatccgtggaaacagcccagtcagacagagccagagcagacttaaatggtggcatcctttcagctggcagccaggaggctgagctttgaatcagctttataatttgaaaattgatctctttgcattgggtggtgatttcgtgctaacaaaagccgtcagggacacaatgctgcctgccctaccttcatggcaccactctggattcaaaacattgagccagagatggggattttccactcctgggagtcttcggtagttgtgccaccctgttgtgggtgacccggagatactggtagaacatttcaagtgctcaggagccacatatgactggtagccagggtattggacagcctaggattatagaacgtttccattactgtaagcattgtattagacagtgttgctacagactggtctatatgtctgaggtcagggtggggatctaccgcagtgggtgggaaaattacttggagaaggggaggcccaggcccggaggtggtcagtcccgagaggccatacctgtctcacccgagaggccacacctgtctcacccgagaggccacacctgtctcacccgagaggccatacctgtctgtctcacctgtgtgcggctctgcactcctgtgcagggccctagtcatgtcatgggaccgcagcaatgcgcagagctgccaggaccaaaatagtgtaggttgttttcttggcctctggctagggagaggttgacattccatttttccccatgggctggttcatatgtgctttctccagatggtgtgctccagaaaggtccttgcgctctgggaatggtttacaatataaataaggtccctcatggagttttgggagggctcagaaggcagcccaccaggatgtggttttcagagctgccccagggctctgcacagccagctgccgtcttggtagcttctacctcgtgctccgggtgcagggatgctcccctcacgcagcttttctgggtggtggatgtgttctcaggctggggcttcctgccctctttccaagtgttgtccccaaactcctgggactcttggtttttggaactggcagcccgtatgagatggggggattaagggcaatgcaggggggtgagtacaaagattaaggtctggggacagccgtctcaggggaggcgtgagctgtggagggcttaccatgagtgaattgggggctgggaatgccaacagttggggacagggcagcttttatgtatctgagggaaaaggagaagttagtctgggaactaaaatagtctattaaattttgtcagtgccaaacagagagtctaggaagaaaaaattatataccacagattgaatggagcaaaattagagttccagccttccctggcaagccagagaagcaggagttgctcagtggctccagtacagcagatggaaacagggcgctttccacttttgcctaagaggcgccccgaggttactgcgggggcaggtggtgtagtggatgctgtcacgtggagatcatagtaaacagaaagaatgttcttggggtcagaaatccagccccttgtatctcgaggcctggagaagcccaggaggaggcgtgcaccttgtctgtcaccatgtacacgagcacatgtgtgcgtgcatgtggagtgtgtgagagagggctgaggaggcaggggtagagtctagcagctcaccgtgagccctgtgcctgctgcagcaaccctccgtcgccccattctgtgacctttagtgagtcagacactcctttgtcttcttatgtgttaaatggagacacgcatgcttgctgggtgttcaagcagttctcatgctttgggtgccttcattaattccaatgcactctttacatcttttcctgctggatcttatgagaaaggttaaggtcccggccttattggggtcttcctcacgttaggcttgggatctacacagtgagtgcagggaggacagggacgagttacaggagagatgagacgtctcattgtagggagtgtcacgtcctccgtgagcctgatgttctgtttaatgcagtttatccctggggcagagaacaggaggaaggtgaagggaatatatatggtgaggtgagagtcggtgtcacattgagaatgtggctatgaactgggtgtggcagagaggcaattttccaggccttgaggagtggaggcggggctgtaatgctacaggggccagatggcggtagagcaggtggcaactgttgcgggacaggaggcagctgaccagctggtctccaagaggacctgaggggtcttcttgggatcatgcaggggtggtagctatgtggcatgagtgatgccattccctgccctttgtgcccatggtgggcaacactaatctatcatcctcagagtcccttaagtatatagcattgtggacagtgatgtcaatcaattggcataaaagttgaaacttattgtctgtcactggtgtgatggaaaggatatagactggagtccagcagaaatgacagccccaccaggtccaagctttgggcacctaccaagcatattagctcgtttttcggttgcaagggacagagacccaattcacattagctttagctaagtcacttaagtcacttaaacatcacagtgtgtgggggaaaatcacttggagaaggggaggctcagccagccttgcagtacagccctaatggaggtcagccccaagaggccacacctgtctcacctgcctcacctgcgtgtggctcaggtaagggctaacttcaggtgtggctggatgaggaatctggtgaggttgctcgggctctgcctctggggcaggctctctctaggtgaaaatgttcacatggctaagccaggtcatgtgctcttcacaggttcctgtggggacggggtggaggtgggggtgataggttctggaaagcaggtcacatggggagcaaagttatcttggaggtcaaacatagaaggatcagcccaagataagagttggggaggtggctgggagaggcgccaagtgttcatctgtgtcttaacaggtgaggagagggagggggtcaataaggttgagccagcaaccttaggacccagcagcttccctggaagaccctgtgcacatggaccagaaaaggccactgtgggcggccttgggtgtcatgtatgtgcaactggtctggctgcttcggccacagtctctgggcagctgaagtgtcctcagatgccaacctcaccgcccacagtagcaccctcttatctgcggcttttcttgatcctgcggcacctggccaattgactagcggtaccacgtctcaaggtcatgcatgtgttctgggagattcaggtttgggccaggctgagctgatcgcttggcaaaccttacagactctagagcgaggcatccagcctaacaggccaaagagtgtttgccaagcatatgtgctgtcttagggacagtctcagaggcttcgttgcctagacaccagagcagggcagctgtccctgcgcaggttggagccctgggttgcactggttccaatcaggtttccttcctgacactgtccctctcccctaccccatcaacccctgccactcacagctccttttcccagatagcaaatgctgtctaatgaatcaccccaaaacaaagtggctcacaacagcagacaccctgttactgctcagtctctgtggctcaggaattcaggaagttcttgtgtgggtcagtaattcaaaaagttactgatttggggcagtcctgacttggggtctctcctggggtggcagtcagatggtgattggagcagctgggggctggccagggctccctcttgccacatggcctctctgttgaggctagtctgggcttcctcacagcatggcagctcagggctgaaaggctgccttgtgtgggggctggcttcctccaggacgaccatccagagacagtcagggggatgcaacgtggctttttttttaacctatccttggaagtcacacagtgtcacttttgctgtactttattggtaaaacagtcaccaaaggctgacctcatttcaagaggagggcctagatctttctcaatgaaaagggatgtcagatataaagggatttgttgacatgatttaaaaccatcacagctcccctggcccctcctggtcaaccaacacttaaagcccagatggctttgaggtagctggatgtgaccttactctagtccagcccttctcattttattatatttatttttgtttattggaactcaggtgcagagagttgagtgaatcatactccagttcattgtacgttttccatcattgattcatgcagtgacctctcatattcactcactcattcatttatgcttcctccttgcccctgtatcttatgctcattttcctcctcaccttccttaaacaatcattctattcgatttcatgaatatcctttcatttgcatgggttcttaaaatatgtattttaatttctaggtaatgtgttgtgttgtatctgtttctgctgaggtccatacgtgctgtaatgcacggatctcatctcttgcccacctaaggtgaggcaaggagactagagcggagtgacacgcccaaggtcacccagctaaaccaggaccgcaacgatcctggccctcttccctcagcatctcacactcatgtttccacgtgccacctcctaaccgcctgcaatagcttgaaataaggttttgaaaaaattgtgaatctggggtccagagagtgtcggaagtgcccctgttttctatctagtaactgttgtgttcttttctcttttgccacaggttccaactatgggagcccacgccccgcccatgccaacatgaatgccaatgcggcagcggggctggcccctgagcacatccccaccccgggggctgccctgtcgtggcaggcggccatcgacgcagcccggcaggctaagctgatgggcagcgctggcaatgcgaccatctccacagtcagctccacgcagcggaagcggcagcaatatgggaaacccaagaagcagggcagcaccacggccacacgcccgccccgagccctgctctgcctgaccctgaagaaccccatccggagggcctgcatcagcattgtcgaatggaaatatcctttgttcaccgggctgggcatgctcctgggacctgcacgctgggtccagccctccgaggctccctgggccacgagctgtgtcagctgtgctgggctacaaacggggcctcgggcctactgcatctgcatcactggggtgctgtgaaatgcagagttctgggccccgccctagactggatgaatcagaatatctggggacggggcccagcaatctgcttgtataataagctgcctgggttgggtttttgttttttgtttttttcatataataagcaacatttgagaaaatcagcctaagaagttatgaaatatcatctcctgtagctgagcttgcccaggggcccactcatgtgttggggtaacagtcgttagttacatgctgcctcattcccttctttcccttctgtgccatggcgctggatgctttcacggccttccctctctctagggtgaaggggctcaggagatggaagagcgtagtggtcagggcccctggctgttggctggagggccctgaagcagtggttctcagccctgattgcacattagagtctcctggaaagttataacaaactacagaccactcagttccacctaggcataaaaacaaacaaacaaaaaacaacaacggaaaactctctgggtaattctaatgtgcagacaaagttgagaacactgtctggaagtgttctgtttgtccatatagaaacaagcaaatgggtccttcagaaacagtggctttgaagggatgggcgctcgctgtggagttacaagccccttacttcatcagaatcctggggctgtagaaattgggaaggacttttttttttttttttttgagacggagtctcgctctgtcacccaggctggagtgcagtggtgccgtctcggctcactgcaagctcctgggttcgcaccattgtcctgcctcagcctcctgtatagccgggaccacaggtgcccgccaccacgctcggctattcttttttgtatttttagtagaaacggggtttcaccgtgttagccaggatggtctcgatctcctaacctcgtgatctgcctgcctcggcctcccaaagtgttgggattacaggtgtaatctgccaccgtgcccagcccagaaaggacctttaagtgctgaagttcctcccccacttccacgagtgatgaaattgagccccacaggagaggctccccagggtcatgtggtcaggaacagatgggactagaaccctggtactgactgtgggaatttttataataaggattcctccaggcaggactgctgtgtctctcaagggccaggatgggagcattaggcttcatcgatgagtttctatggaaagatttaaaagtctcaggtactggttgaaagaaggtagcctagagataaagaaagtttctattgagacagaaatgttctataaatgtttgaggccaggtgcggtggctcacgcctgtaatcccagcactttgggaagccaaggcaggtggatcacctgaggtcaggagttcgagaccagcctggccaacatgaggtgaaaccttatctctgctaataatacaaaaattagccaggcgttggggcacatgccagtaattccagctgctcgggaggctgaggcaagagaattgcttgaactcgggacgaagaggttgcagtgagctgagatcatgccactgcactccagcctgaggaaaagagtgaaactctgtctcaaataaataaataaataaatataaatgtttgagcccctcaacttaaaagtattttaagaaaatgcattttaaaacaagtggctgcagctgcctgagtggccaagcatggttttagtgcccggggtactggatgggagactaggctttagtcagccccataggactgcttgcatatctgctcacggtggagtcagggagtgggagagctgagggccctgcaggtcaggcacccctgagagaagggcagcaaggcccagagaagacaaagggcttgccctaaatcacgcagctggcaactgacagagctggacttcaaatccaggttcccctgaccccgaagtccatgcccatcccacaccccatgcatccatagtactgggtaggactaggcaggtactagtagatactaggtgggaccggtgaggtcttaggaggatgctcagggcctgcagtccaggtgcactgggacacgccggacctggatccgggcctaacacctactccctgggtgctgtggccacccctccgggggagtgtgccttcccacctggaggagaggaagggggcccagccttagcagtgccaggtgggtggcattccaagattgcttgggaagactggctggacagggaaggagatagcctggagtactagccagccagttcttcttgaagaagtggaatccgaccctgtcattaggaagggaactcagcttaaaaagtaatctgggcctcaaaaggcgacacagagcacttcccagggcttacctgggttctctgcttttcagccagtggcttttcttctctgcctgattggtttttacacatgatcttctctggcattagcccagtgcctttagcatgaagtgaaggatggataggtggagagtctgaatgaggggaggggaactgatagtgccagaaaccccaagctcagctgtgccccactgtggtggaggcaatgaagtgacatgttctgggtgtgtgtgcacgggtctggtttggctgggttgttgcatccttgtcccgatggggagagcacaggcaccagctgatggaatgaaactggccagcctgtgggctcggtgtcactttcctaagcaggcgagaaaaggtttgggaggcaagaggtggcgtggtaggagggctaaaagaactgcctatgaaggcttcaaggtaactttagagtggatcagtatagaatagtccttaacactgagactgcctgagcttggatcccatcctactacttgctctgtgacctggcacaagttaacgtctgacccttctgtgcctcagttttctcatttagaaagtggggatcacaagcgtacattccacacagagcatttctgttgggccgtaagaatgtgcctggcactgagcaagctcttggcagaggtcagcttctgtccttactgtcaccagcaccagcatcagcgtctgtctcccatcatcactacttgtgcctcatccaacacaagggcagcagaatgtaaaagcttagtccgtctgggttccggtccaggctctgctatatgccagcttggggtcttggactggctgctttacttttcacccctgcaaagttgggagattgacaggtccactgtgtggcatcttttttgatatcaaggtggacatagaaaatgttctacaggaaaatggatcctcagaagtacccacaggactagggagactagtgctaagataatcactcgggttcctcccagttcagaattctgtgacgctggcccagggctgccccttaacacgtcagaaggccgtctgtggcaggggagtgaacactggacttggtgatcgggaaatccgggctctagtctcagctggtcattaacttgctgtggggccttgggaaagttcctcaggctctctgggcctcagagggttagactagatcatctctaaggtctctttctgcctcaatattcactaactttgtgagtatggatttccctgagagaattatggtggtcccttcaccccggatctccacccctctctgtcttcctcctcctcctcctgtgagactccatgaactgggctgcaaacttggcagtgggagcggggtaggtgggagtggagctggaagagcatagacgggcccttcctgggaagcttccccttgctggccttccatggagggtgtggggtggtcccgtcggaaggggtattatcacattagctcatttttctcttgagagcgtgtcctgccctgaaaatgtgatgaagaagtcagggcatgggaacctctgcctgcactactactggtgagggaaccttgggctgtcccactagagcccagcacacaccaaggaaaaatcaggaggccttggaatcaaagctttgcctgctgaagcgggacctctgcagaccagaggggtttctatgctgtctgtgagactcagccttaaagaggagacagctttccttccctacactcaggacggaccccctgccgtactcttgggggtcttcaggatctctggaacctgccagagaatgagagagaagaaatggaaaccactcttaaccttagtttaaaagattaaaaataaaatctccaaatttcaatgaaacccagagaaagtctctctgtcttggaatcctgttccacccatgtcccccgttccaggtgggcgtgggcccacaggccgttcggcataaactgtgaagaaacggggtgcttggcgcaggccatgctctttagaggcaacctcaggcacacattggggagaatgaagaccaatgcaatctaaataaatgaaaggaggggaacaagtttttagaaatctgtgtttactctggcacgcgactggcctccactgcttttgacatattagggaaaattttggcggggacccactagaagcacttaaaaaggcatatgtttcttttcagaatacaaggggcttggaatgcattgtttaaacaaaattcttatgaatctttgattcattttaaaaaatatgtagattatgtttgtttcacttgtactttctgtggcattaacttccttgactccctttctcagaccatttgaaataattattttactgactatttttgccaattgtgtggccttagcgatctatattccctttccagaagatgattccaacgccaccaattccaacctggtaagtccaccatcctcaagtctctgctttttcactcgatggagaactgcgttcagatcacatagatgcatggaatgtgggagagaagtgagacgtgtgtttggcatgtgcaggagccctgcagagctcacatcccgagtgctgttttactctttattcaaatcagcacctgtctcattccggcctgttttccaaaagaatattccagttaggtggtggtgagctctgtgtgtgtgtgtgtgtgtgtgtgtgtgtgtgtgtgtgtgtttagtagcaaatcccgtgactgctacaaaatgtgctgcaaaagttgtgagtgcaggtgttcgctgcagcgaacatctgttcttggattgtgttgtatttcctttgaatgtctttgttccattggtggggtttgctcaggtgatctggagtgttgctgcacgataaataatttctaggaagcttttaggaacatttgcttttgcagccaacatgtattattgagttagaagggccttattttattgggaaaggcggctttccatttggattgttgaggggccagctctggcaatttggggttagaattggtccatggaaaaagtggagagtgtgtttacttttggctgagcttgaagtcattacaaagacttttgctccatctgggcatgtgaggaaaagagctctggaatgcagttggcaaaattggggcactccaggatgcctctgcaaaaggcatgcagggaaaatcccgtctctttctccccctccattgcagagacaccgtcactctccacgtgatttccacatggcgtgtttggtcatcagagccaccgtctttcccctgccgtcagtaccttcctttaattactgagatggaaccgtccaatgagatggtttttaaaagaagcaggcagcttataggattctcctttccacagctgctgggctgatgccatcacagggtggttcttgtattttgtaacctttgacattttcttgggccctttcagcaaaaaaaaatatgatgcacgttttaacttctcagctgtcgccccagttttttcaggtaaccgctgatgcatagcaggtaaggtgttcaccgcctgcgggctgtggtgtcttgtggctcggcttggggccctttgttggggacaggctccaaaaatttcaaagctgggcacaccactgagtgatggcatggccagagtcggaaggcagagcatcggccgccgtccgtgaggccatccgaagcgtgacctcatctcttaaggggcaagaaatctttactgtgtcaaaataaatacaagccaaagtgtctccctgaagcaggaactccttcccttggttccatttcttccctgtgtagccacctccttcctctgccatggtcctcccaaccctcctacagtttcacatttaatctgcaacttttaaagaggagccttcgttccacatagaatccgtatcttgttcttaagctgatgacacttggggctgctcaaggcccatgcagtggtgaaggtgtgtagaggagtttggtttttcttaggtcctgagatggccacatgtagccccttcacccctcggtttccaggaggattaagggagccacttggcttgctgagctagagggaagccctgggctggctgagacccctcaactctggacctcctggaggcagaggggctcgtaggagaggacaagaggtcaccctggacttcttctggagctggagtgaggttgctgtgtacagatgaggtgggagggatggcaggtttttatcacatcacagagtgatggaagaattctaaaggaggtggtggggctgcttgcacaactgtgtaactttaccaaacatcatcgaattgtgtacttacagggggtgaactttatggtatggtaatgatacctcaaaaaagctgcagatgacttctcattctctgcattccacaatgtcgcacttcccctggggcagtgaatgctgccagctgaaggtggggggtggcatcagaaaacccttaaaacagatgaataaatacgacctcatatcagctaataaatcagaacacgattctgccccatggagaaacccatcgcgagtgctgtgacccggcctcccggtccttgctctctacagcatcttgaagctgcagcatctttgcagatgccccctttacaaagcacattctccccttgcttcttccagcctctcctcctgtgtctacacgaacgtttactaggcttttgtcctgagccctctgattttcttcttctgcactctccctttggggagctcatctgtgtccacagatttaagttacctttccaagtaaattgttgctaagactgacatctccagtgctaagcctttccaaaggcctggccccatatttcccgcattggagaggcctgtggaccggtgcagcgaccgctgaggcctgcacatcattacaacccgagagaactccaactgtgcagaccccagctcccctgcggatctgattcacatttagtagttctggggcatggtctggggatgcgcatcaaaaaatttcctcgcagggatgccgatgattagtcagctttgggaacaaccggcctcttgggcagagcaaaatttgagttggacagacctgacttcaaatcttggcttctccactttaagattaagtctgggccgggcgcagtggcccatgcctgtaatcccagcactttgggaggttgaggcaggtggatcatgaggtcaggagatcgagaccagcctggctaacacggtaaaaccccatctctactaaaaatacaaaaaattagccaggcgtggtggcgggcacctgtagtcccagctactcaggaggctgaggcaggagaatggtgtgaacgtgggaggcggagcttgcagtgagccgagatcgcgccaccgcactccagcctgggtgacagaaggagactccatctcaaaaaaaaaaaaaaaaaaaaaaggttaagtctgaatcttagtctgaggttatttagtctttccaaacctcagttccccagcttgtaaaatggaagtgacctcagagggttctagggaagagtagggcgggcagtgacaattatatgtgccaggatgtcttgccaatacctcaaacaagccccaaatagaactcattctctctcccaccacacgaccctgtccccctgaagaaaacgaaacatagcccaggtgaatgctgctccttttcttttcccttggccgggttgatggcattgctggccttgctgtcacatggaaccatctctgacatcttcttccccttgccatgcccatctgagcaggaatccagtcttggagattgtaatttgcaatgtatcacatttagctttctttctattctcaaagtcatttgttcagacttcctgtgccttagtttcttcatttataaaatggaaataacgataatgacagtacctacctcatagggttgttgtgaagattaaatgagccaaaatatgtaaagcccttaggagagcaccttagtaagggcgaagtgttgggtcttgttaatagtgctggatactattgttattattgtcatcatcatcatccttgtcaacctaacccaggccctgttgcctttttcatggactcttacagtcacctccttcctgctgtcctccctctggtctctccttccactggtctagctcgtgtgtgtgtgtgtgtgtgtgtgtgtgtgtgtgtgtgtgtgcagtcatttgccaaacatctataccaacagataggcactatgattaatagggaagatgaaactgtaaacagttgtttcaaatagtgaaaggtcttataaagggccagggtgtcagggtggaagaactgattcattttgctgtagagaaaggattaatggcaagtttcacataggttgacatatttgcattgcgtctctcaagaagaggatgccataagagatacttcaggttgaagtgtactcatgtgcaaaggcatgagtatacatgtggtcacattctttaggaccagaggaaggggtgctggttttgaggggatgagaagagccaggtgatgggggcttgatggcccatgcaaactgttggacttaactgcaggtgaggaggaggctcgaaggctttaacggcagaggagtgctcttgcagcatgaggaagatggctcagacggaggcctcactgtttgtgaagagaaaaagaaagcttgccagagtccagatggtggtgacaataaggatagagagggggcagtggatttaggaggcaagcttgcctggacgggtaaccagttggatatcatgggtggcggagagagctggctcccaggatggtgatacgaggagccaggtgcccttggccaggagaaagacttcaggaggaaggtcatatttgaggggcagggaatgatgcgtacgattagggattgtcaagtggaggagcccgtggagcgtgaggctggggatgtcctaccggcggtcgacaggagcctgcaacccaggagactgtttatgctgaggatggagacttgggggcaacaggaggagagacacaaggagaagctgtaggtatggcccagagcacctgcatcagggtggagtgggagggtagcagtgaccacagccagaccctggagaacagtgacgtttgcagagggtggaggaagaggagcaaaggaaggtcatacaccacgtgtcaggaaggcttagcctgagaggtaggaggggaacctgctgagagtggagtcttagaagctaagggaacagagagtttaagatattcaagaggggctggttggtagttcaaaatcgtggctcatggcaactcaaggccaatgacaagaggattggcctgactgagaagagctgagcttagggccaaaagtacgagaagaggatattgatctgtgtctgtacccctatggaggccctgaagtagtaggtgcatgacaactgtttgctgaggttcaatgcttgaaacattcccattgttgtgccagagtgggatgccccaaatcacttatgtaccccgaaaatgaagcttgagaaatcctccattagtttcatagctttttttaaaaaattaaagaattgcgatttcagagccctactctgagaaacagcaaagaagagatgctgatgcacctgaagcaggtggctctcaacccctgtggcataagttcatagagatgattaaaatgcatgttcccaggccctgctcccagagattctgactctggagtgggccctaggagtttgaatttttaataagctcccctggggttctgatgcaagtggtcctgggctgctctttgagaacagtgacctagaatgttcctcatggtgtgattggatccaccttcagctccctccgcaatcagctctgtctacccacaggttccctttaggatccaagcagaaagacgacacacgtcaactgctgagagctttcccactccattgggttcaagaataatctatttagcaaagcacactcacactgtcacagaattagaaaagattcttcttttcacacacacttgcaaattcacatctgtgcttgctcctgctctcagattccctcgcaaacgcatcggcttccacccattctgtcgcaggccctttcctttctcccacttatttttctaacactttgctttcttctgtttccaagagatgaaaagtattccagaatagagttttttttttaaaagatctctctctcattatttaaataaaagtctgtttgttgtatgctccatctaacatacacttttgcaccaaaatccatcatctttgttatcttttcctcatgctagtgaagcataatgaaagctgaactgggccatgacatgacaattctttctttagatttagtgctgttattggcaatgccacctctatgcagcacatcgtttataatatagcagctgtaacccctgtctaccaagagctattacctgttaggtagattgtctgatgtctgttgaacaagctctgcaagcggagccgactcattgtgtgtggaaaacttcctgtcctctgcataccctgaagcccacgaagacttggcttgagttgaaatattaagagaatatatttggcatttgaccttgtgcaaagaacagtgcatgtactttctggagcaagagccaagcttgaagtggaggtggagagaagacgggatgaggccatcaaagggatcatcttttggctgggctttcttccttcagaggttgtgagaggagaagccgtccgtcagaggggcttgagctagactaggaagaaggttgagatgtcagatttgcccatttattggtgtaaaattggggcaaccagagttgcctcataacctggctgagaggattaagtgagttaccataagtaaacttcacaggacatgcccagcacaggcgaatgtgtgttgctctttggaactctaagccaggctgagggcccctcccctctgcctggtccctgggggtaagtcacagtcattggcaccttgtgctagctttggcctcagaagggtgggaaagaagagaccaaaacgctgtgctttttggcagctgtgacccagcaagattagtgtctgtgtgctcacccttgccttctgactacacagggagagaagctgggatccattaatggccaaagaagagccccagagggagagcactggtgggggaccccactcccccacccctgagctttgtgtgtctcttgccagtctgctcaggaggtgcctgtcagcctgaggttcccccattcccacacagtgctgggttgaatcacccgacatggggccctgcacttggaccaccaccgcaagttctgagatgcgtctgagccctatcgccccccgtgctttgagaagtgaatggaaatgccactttgggttcccctcctctccctgcagtgaactgtgttttcttttattatcaggtttgcctaagagtgagaagtatttttatagggctttcatgcatcaacaataatgatgacaatgaaatgagctttattattgctatctcttatgtgttgtcctaatgcagcaggtgttagggtttgcagaaatgctagggttataaaatacactaatagataactacaagcaacaaaccacatagctactgtatcatgtacaaacaccctgtcctgtgctgtgtagtggggtgtggaaggcagggtggagagcctgtttttggatgagagaatgagcttgacacagcgcattgggaaagtgcttctacggagtcagttctcccctcagattttccggctgaatgggtctgagtgggacctgggtgtgggtgtgtcttaaaagctataccagagccagagttgcaggcactgacctaggaagagagatctgaactgtgtggccttaggtcagtcacttaacctctctgttggtatctcttttggcacgtggagtagtaatgcttgcttagtcattgtaattgcctttattgagtgaccaccaggtaccagagctttgcgtgcaatgtttctaatctccacaactgtaaattatgctttctatttatttgtttacttgatggtagagaatgtatccctcttgttcatggctgtatccccagtgctttggcaataactggcacacgtaaggctctccataaatatctgctgagtgaaccctgggtgaatgaatggatcctgtgaagtgttatccctttatttcagataagaaagtaaagtctcagagaagtaaagtgacttggtgaggcagtggcagggctgtagttggaacttaggactgtatgaaaccacagcttgggttctttgctctgttccctgggatgtgtagggtcgctgtgagtatccaatgaagtatatgtgaaaatattttaaagattaaacactctgtagcagtattaacagatttaaaataaaaacaaacaaaatttggttctgttgcaaaataaattcagtaagtaccaagttagccaaaggtaaatacattatttttttaccttttttttgagacagagtctctctctgtcgcccaggctggagtgcagtggcgcgatctcggctcactgcaagctccacctcccgggttcacgccgttctcccgtctcagcctcccgagtagctgggactacacgcgctcagcaccatgcccagctaatttttttgtatttttagtagagacggggtttcaccgtgttagtcaggatggtctcgatctcctgacctcgtgatctgcccgcctcggcctcccaaaatgctgggattacaggcgtgagccactgcgcccggccaggtaaatacattattataagacttctccaagcctctaacacaacagcaacagacactacttatgacttcacaccatgtgcagatgctgtcctaagtgccttgcgtataaatgcgtttaaacatgattatagcacgatgagatgttattatcccattcaatagatgagcacacacaagctcagagaaggtaaataattcaccctgtgagatgtagccctgaagcgaagtcatggccatgcagaagtgggtgaggcatctcccggtctgtgttcttagccattctgctacagctgcctccttgtgtggtaaggtgctccgtgagtccctggactagccagacagcacatcacctttcccactcataccatcacagacatcttgaagaatggtgttcccgggctcacacctttgggaaatgctgctctgtgttgccccaagaaccgatgcattaggagaaaggacagagctggaaacgggatgagacacgttgcaaggctggtgtaggaaaggagcaaagaccacaggactgtcttcatcaggaacatggcatttcaaaatagatggcagcttctggatgggtctgtgcttcatctcatggtcataaacccgcagagagcctggggcaattgtttgactcagggtttactcactaaatatttcagagagaggagaaagcattgtctgctctgcgtttgccagcggatgggaaaagagagatgatgatttgaagtctaaatatggtgacacctcttgctccagttttatccatctttattcattttttgggggagaatcttccaaataaattcactgtttatgtaatagaacccctttcatgtaccaaacttcttgtaatttaagtatatttgaaggaagtctttccagaatataaaatacaaatccctggatccttaaaagaaaaatctgaacatatttcatcctttttctgggactatacaattcttaggaatttcaatgattgcacctgttgtaatgctggggagctgtcaggagagctaagcaacccgcacagggtcccggaacgtcctgacctggggaagatttgggatgtgcctttcatgcaccaccctgttggggtgtcagcctcctccagcaccagcctgattaatttgctcccccctctctcctgcaggcttgggaaccagttgatcaagtccattacagttatgtgcaaagttagagtaaatagatcctgattgaggacctatggggcttacttatgaataaagtgcattagctttaatttatgggttttataacattgattttggcttcttagaagccatttttcccctttattctctttgttctctctagtttctgtatgattgaagttgttggattggcgccttctaactaataataatagcagcaataacttcagcccttacgctgctggcattgctctatggtccgtgtgttaactcatttagtcccctcgactaccccatgagacctttcttttttttttttttttttttaatgccaaacattacattttattacctttgagcttattaaccagctttgcgtttattagcaaatacatttaaatatctcttttttttttcttttctttttttattatactttaggttttagggtacatgtgcacattgtgcaggttagttacatatgtatacatgtgccatgctggtgcgctgcacccactaactcatcatctagcattaggtatatctcccaatgctatccctcccccctccccccaccccaccacagtccccagagtgtgatattccctttcctgtgtccatgtgatctcattgttcaattcccacctatgagtgagaatatgcggtgtttggttttttgttcttgtgatagtttactgagaatgatgatttccaatttcatccatgtccctacaaaggacatgaactcatcattttttatggctgcatagtattccatggtgtatatgtgccacattttcttaatccagtctatcattgttggacatttgggttggttccaagtctttgctattgtgaataatgccgcaataaacatacgtgtgcatgtgtctttatagcagcatgatttatagtcatttgggtatatacccagtaatgggatggctgggtcaaatggtatttctagttctagatccctgaggaatcgccacactgacttccacaatggttgaactagtttacagtcccaccaacaatgtaaaagtgttcgtatttctccacatcctctccagcacctgttgtttcctgactttttaatgattgccattctaactggtgtgagatggtatctcattgtggttttgatttgcatttctctgatggccagtgatgatgagcattttttcatgtgttttttggctgcataaatgtcttcttttgagaagtgtctgttcatgtccttcgcccactttttgatggggttgtttgtttttttcttgtaaatttggttgagttcattgtagattctggatattagccctttgtcagatgagtaggttgcgaaaattttctcccatgttgtaggttgcctgttcactctgatggtagtttcttttgctgtgcagaagctctttagtttaattagatcccatttgtcaattttgtcttttgttgccattgcttttggtgttttggacatgaagtccttgcccatgcctatgtcctgaatggtaatgcctaggttttcttctagggtttttatggttttaggtctaacgtttaaatctttaatccatcttgaattgatttttgtataaggtgtaaggaagggatccagtttcagctttctacatatggctagccagttttcccagcaccatttattaaatagggaatcctttccccatttcttgtttttctcaggtttgtcaaagatcagacagttgtaggtatgcggtgttatttctgagggctctgttctgttccattgatctatatctctgttttggtaccaataccatgctgttttggttactgtagccttgtagtaaagtttgaagtcaggtagtgtgatgcctccagctttgttcttttggcttaggattgacttggcaatgcgggctcttttttggttccatatgaagtttaaagtagttttttccaattctgtgaagaaagtcattggtagcttgatggggatggcattgaatctgtaaattaccttgggcagtatggccattttcacaatattgattcttcctacccatgagcatggaatgttcttccatttgtttgtatcctcttttatttccttgagcagtggtttgtagttctccttgaagaggtccttcacaacccttgtaagttggattcctaggtattttattctctttgagcaattgtgaatgggagttcacttatgatttggctctctgtttgtctgttgttggtgtataagaatgcttgtgatttttgtacattgattttgtatcctgagactttgctgaaattgcttatcagcttaaggagattttgggctgagacaatggggttttgtagatatacaatcatgtcatctgcaaacagggacaatttgacttcctcttttcctaattgaataccctttatttccttctcctgcctaattgccctggccagaacttccaacactatgttgaataggagtggtgagagagggcatccctgtcttgtgccagttttcaaagggaatgcttccagtttttgcccattcagtatgatattggctgtgggtttttcatagatagctcttattattttgaaatacgtcccatcaatacctaatttattgagagtttttagcatgaagggttgttgaattttgtcaaaggctttttctgcatctattgagataatcatgtggtttttgtctttggttctgtttatgtgctggattacatttattgatttgcgtatattgaaccagccttgcatcccagggatgaagcccacttgatcatggtggataagctttttgatgtgctgctggattcggtttgccagtattttattgaggatttttgcatcagtgttcatcaaggatattggtctaaaattctctttttttgttgtgtctctgcccggctttggtatcagaatgatgctggcctcataaaatgagttagggaggattccctctttttctattgattggaatagtttcagaaggaatggtaccagttcctccttgtacctctggtagaattcggctgtgaatccatctggtcctggactctttttggttggtaagctattgattattgccacaatttcagctcctgttattggtctattaagagattcaacttcttcctggtttagtcttgggagagtgtatgtgtcgaggaatttatccatttcttctagattttctagtttatttgcgtagaggtgtttgtagtattctctgatggtagtttgtatttctgtgggatcggtggtgatatcccctttatcattttttattgtgtctatttgattcttctctctttttttctttattagtcttgctagtggtctatcaattttgttgatcctttcaaaaaaccagctcctggattcattgattttttgaagggttttttgtgtctctatttccttcagttctgctctgattttagttatttcttgccttctgctagcttttgaatgtgtttgctcttgcttttctagttcttttaattgtgatgttagggtgtcaattttggatctttcctgctttctcttgtgggcatttagtgctataaatttccctctacacactgctttgaatgcatcccagagattctggtatgttgtgtctttgttctcgttggtttcaaagaacatctttatttctgacttcatttcgttatgtacccagtagtcattcaggagcaggttgttcagtttccatgtagttgagtggctttgagtgagattcttaatcctgagttctagtttgattgcactgtggtctgagagatagtttgttataatttctgttcttttacatttgctgaggagagctttacttccaactatgtggtcaattttggaataggtgtggtgtggtgctgaaaaaaatgtatattctgttgatttggggtggagagttctgtagatgtctattaggtccgcttggtgcagagctgagttcaattcctgggtatccttgttgactttctgtctcgttgatctgtctaatgttgacagtggggtgttaaagtctcccattattattgtgtgggagtctaagtcaatttgtaggtcactcaggacttgctttatgaatctgggtgctcctgtattgggtgcatatatatttaggatagttagctcttcttgttgaattgatccctttaccattatgtaatggccttctttgtctcttttgatctttgttggtttaaagtctgttttatcagagactaggattgcaacccctgcctttttttgttttccattggcttggtagatcttcctccatccttttattttgagcctatgtgtgtctctgcacgtgagatgggtttcctgaatacagcacactgatgggtcttgactctttatccaatttgccagtctgtgtcttttaattggagcatttagtccatttacatttaaagttaatattgttatgtgtgaatttgatcctgtcattatgatgttagctggttattttgctcattagttgatgcagtttcttcctagtctcgatggtctttacattttggcatgattttgcagcggctggtactggttgttcctttccatgtttagcgcttccttcaggagctcttttagggcaggtctggtggtgacaaaatctctcagcatttgcttgtctgtaaagtattttatttctccttcacttatgaagcttagcttggctggatatgaaattctgggttggaaattcttttctttaagaatgttgaatattggcccccactctcttctggcttgtagggtttctgccgagagatccgctgttagtctgatgggcttccctttgagggtaacccgacctttctctctggctgcccttaacattttttccttcatttcaactttggtgaatctgacaattatgtgtcttggagttgctcttctcgaggagtatctttgtggcgttctctgtatttcctgaatctgaacgttggcctgccttgctagattggggaagttctcctggataatatcctgcagagtgttttccaacttggttccattctccccatcactttcaggtacaccaatcagacgtagatttggtcttttcacatagtcccatatttcttggaggctttgctcatttctttttattcttttttctctaaacttcccttctcacttcatttcattcatttcatcttccattgctgacaccctttcttccagttgatcgcatcagctcctgaggcttctgcattcttcatgtagttcttgagccttggttttcagctccatcagctcctttaagcacttctctgtattggttattctagttatacattcttctaaatttttttcaaagttttcaacttctttgcctttggtttgagtgtcctcccgtagctcagagtaatttgattgtctgaagccttcttctctcagctcgtcaaagtcattctccatccagctttgttctgttgctggtgaggagctgcgttcctttggaggaggagaggcgctctgatttttagagcttccagtttttctgttctgttttttccccatctttgtggttttatctacttttggtctttgatgatggtgatgtacagatgggtttttggtgtggatgtcctttctgtttgttagttttccttctaacagacaggaccctcagctgcaggtctgttggagtaccctgctgtgagaggtgtcagtctgcccctgctggggggtgcctcccagttaggctgctcaggggtcaggggtcagggacccacttgaagaggcagtctgcccgttctcagatctccagccgcgtgctgggagaaccactgctctcttcaaagctgtcagacagggacatttaagtctgcagaagttactgctgtctttttgtttgtctgtgccctgcccccagaggtggagcctacagaggcaggcaggcctccttgagctgtggtaggctccacccagttcgagcttcccggctgctttgtttacctaatcaagcccgggcaatggcgggcgcccctcccccagcctcgctgccgccttgcagtttgatctcagactgctgtgctagcaatcagcgagactccgtgggcgtaggaccctccgagccaggtgtgggatatagtctcgtggtgcgccgttttttaagccggtctgaaaagcgcaatattcgggtgggagtgacccaattttccaggtgcgtccgtcacccctttctttgactcggaaagggaactccctgaccgcttgcgcttcccaggtgaggcaatgcctcgccctgctttggctcgcgcacccactggcctgcgcccactgtctggcactccctagtgagatgaacccggtacctcagatggaaatgcagaaatcacccgtcttctgcgtcggtcacgctgagagctgtagaccggagctgttcctattcggccatcttggctcctcctcgagacctttcttgtaatcaccccattttaaagatgaggaaggggcacagggcaatgaactaacttgcccaagtttgcatagctatgaagcagtggagctgggattccagcctgggtgtgtggctcccaagtctgtgcttttaactgctatgctgtgtggcccccaactaaggtataaatgggaggggtattttgctttgaatacgatgccttaattatcaggccttcaactagagtttatgcagtgtgtgcgcttctgtctttaccaagaggaccaagggaggagcaacagtgaaggagggagtgaacgtccccaggctgggtggtgtctgtaggggtcctgggggcatgccatggagcccccaggccatgccatttggaaagcataaggggtaggcaaaggggaggccttttcatctgctactacctgagaggtagacttggctttgaggccatattttcccagggatcagtgattcatattacctgagatcctcaaccaaacaggcccccgggcctcttcctaaatagatgagaatctctggttggggtgagggaacccagaatcagcctgactttctgagacaaacttaaaacttgagggacccttctcgtggactgagtccttggaagcagatcttgggagctgctgggcctgcatttgaacttggggccttcatgggaccccagtcagtactggtggttggcagggctcagagcataacatgtgggggaccccacggcgccccgcccaggtgagagcagtccccctctcgtgccgagaggctccacaggttttgcctgtgcaccctaggccccactggagacgtggaaacatcgaagagctacggcctgaacaccaggatgtgggatgggtagtaagagagtgctgagctgcatgtcctagccctgggctctggttccagttctacctctgcctggtggcacggccttgtcacttcacttctctgagttttaggtttctcggctgtgaaataaagataataattcctacctcactgagttatggcaagggcaaatgagaatatagatagaaatgctccgcccagctctaccaaaaaaaaaagtatatatatacacacacatacacacacattagctgggcatggtggcttgcacctgtagttttagctgcttgggaggctgagacgggaggagtgcttcaacccaggagttcaaggcagcagtgagctatgattacaccagggtgatggggcgagaccccatgtttattttttaaaatgctctggaaaaatgcaaagtgccatataaacatagaggcattattgtgatcattattactgttatgattcaaactagacagatatatttgtctctaaaatacttactgtttttttttttctggcacattcctctgtgaacctttttcctcagcctcctctcaagataacttagagatgcaaaagaactagaagccaagttccaaatttagttcttgacctttccaagatgggtggtgagtggtgtggctgcaacctgcctgctgccaagagtctggcagggctgccggggtccgggagcgccaggccagtggaccctgtctttgtgtgcagtcctggagccgacacatcgcctcacacaggcgcccctgccgggagctcatgcgggccactccctgttttctcactgggtctagctgaactctggcacagcgagtgtagctgctgagtagttcgtttggtgctgtcctgtgacttgcaaaccccttcctcaaatgcatagcagaaatagtgggaaaaccccagggcttttattatctgggctctcgggcacacagtcagaaacatggcctggggcagcctctcttctctgtgcctttgagtcctgaggaacaaggtcaggcatcaagaataaggaaggccaggatatccaggaggagacctcacgtctgcaccgaggcttcatcagatctgactggaagtgctgtggtccctgtggccaggccagccttcacagggctggggagcacaagccttggtgtggcctgtgcttgcagatggatcctggttgtgtgggggaaggcaggtggcaggtggtggatgctatgcttgagggctgggctgtgtacgcagctcacagtgtggaggtgcttgaaccctggcagttgggcacggttgatagggacgggccttgtgggagaaggtgtcgaaggccagggtgtggctccgagtcccacttctgctagactgaccagagagagcaggtaagagagtgaccagcagcaggccggggtcacttccacgcttcctgcccatcggaggaatgttccagaggttatcccagagagaggtgaagcccaacatggtctttcagccacacgccgggctccccttccccttctgccatgagtggaagcagcctgaggccctcaccagaagcagatgctagagccatgcctcttgtgcggcctgcagaaccgtgagccaaatacgcctcttttctttttaagtaaccctgcctcaggtattcctttatagcaacacaaatggacttagacaatccccaaggcccagacttggagtcccttcttgtaggaagttttctctgctcctccatgactggctttggtgctgccctctgtgtttccatagcattctagatgacccctatcaaagcacatttagcctcctgcttactcatctgcgtctctcagtgtgtttgttttctagcactgctgtgaaaataccatgcatttggtggcttaaaacaatagaaatttattgtctcacagttccagaggccagagtttcaaagtccaggtgttagtagcattggttcctctgggcactctgaggagtgtgttccgtgctcctgccctggctccagtgttgccagcagcgcctggcatcccttggcttctaggtgcctcactccagatctctgcctccgtcttcacatggcgcgctcccctgggtgtttgtgtctctgtgtccagctttccctcctctgataaggacagcagtcattggattagggctccttcaccttaatccagtataacctcattttcacatgattccatctgcaaagactttatttccaaataaagtccatctgcagctctcaccagcagcgagccctgtgcaagaagggatcacatctacacagatccagtgcagtacctggagtacagctggggccttgcgcatgtctgtgagggccaggccaggctgttagagtgtttcttgaaggaaggtgtgcttcagtgtggatgctggtcctgactgggccgctgcccttgcctgttagctccagacagggtgggcttctgtacccgtttacagtatagccgcctgagggaccgtggcatgtgtggcagaggagatctcttgcgcccctgaggtcctccagttatatcttagtcctgcagcttagcaccaatgcctcctcattctctgcctcctctgcccgctggcctcagacatgcgccctaaagatgggagcatgcagtgtgaactggaggtgtaaggggtgaggccgctcccaggacacagcgggcctcatgcgacatgccctggcttctggatccctaagcaccgaggccatccagggaagggctggcctcctccctggctctcagggtgctgtgaatcaggtttggcaggggtctcagcaggggcttatctctgccacagttcagtccaaacaggatgagcagctcttggtggaccagcggtgacccaggcagctcctggtgctgtgtactaggctaggagctttggagggcgtccctccctgcagacccctctctcactgcccatacggctgtgtgttgtcatcatattttggcagagaacctgtcccataaccagagaacctctgtcctgggacagggacaggccccagctcactctgggaacagtcacggtgggtggacgatttgcagaatggtcggagaccctccagcaagaggatccattgttcacgactgcagggtgatttctttgggattgcagacaagggcctcccagtcacttttggtttggtgtctgttcttaacacagttcctgaaacatagaaggcactcgatgagtatttgctgaataaataactgaatgaatatgtgaagaagagaagctgttcatggactagggattctggcaaggtgtggcatggctgagacagcaccagatgagaggctaggaggcctccatcccagacctctctctgctcctcaccagctgagtgaccttgggcaaatgtctttgcttctcttgacctctgtttgttcatttttcttaatctaggagaggagtatatgtagaggattcttttatgttctgtgcatctgtggtcttttgcctgacaagtagaccatttgacttcatatgagcacattccttcatgcattccttctgtcatatttattaaatgcctactgtgtaccaggctaggtgctggaaaagcaagatgtgcggaaacaagggtgcgcagggtctctgccctcacagagcttgtcaggtttgataagagcttacgttcttatgatgccagccaataaacaactggcaacttcatacacaccatgctttcagagcactgtgaatattaataccatggagaaagtaaaggagataatgagatggagagttccagggtaagggcccacctggagcgggtaggcagggagggtctctctgaggaggtggcactggggctgagaggtggtgacaagatgggctggctctgggcagacctggggaggaggctgcgggcaggggacagcagggccaggaccccgaggtgagcagggcccactgtggctgctgctcaggaggggagatgaaggaggatgtgagtggggttggaggggcagacaggggctgaattatgtgggtcagcatgaggagtttgttgtgagtgtgacgttggcaggtctgtgtgcttcccaaggctccagaggagcaggaaggatctggaggagggttaggaaggtagcagagataggcgagggttacggccttgactttagcattcccagagcagttgatgtggttgccagagggcctggccagagctcactggggaagaaagccctggacggtgcaagctgccatttcttgaagggaagtcggtcatggaaacatgtcaaagggacctgccagaagcttctgggacacaaggctcttgtgaggtgttttcccgtctcttttgtgtacactgtgggcttggccatccagccttcatttccctagcaacttctctacatccagatccataagagaaacctttctggtcaccccataagggatgcaagctccgtaacgagcactcaggctcctcgctgatgggggctgcgaggttccagaaggttggcccatgcagcaggccactccttagcgcctctggccctgggtagactttggcctcaggggaaaggagcgtggagacagctgtggacacccagattgctgtatatctgacagcgcttggcccccatctatctggaagtggggtgaggcagactgcattttcaagctcaaccctttcctttatggcagctggggtgggtgaccagccctgtgtaagccataataacccagcctgcatgaggataccataaagcggaagccgggcggctctttgaagggatgacgtgggaagggtatcctctcctttccagcattccttcatttggggagcactgcctccttgggacaagactctgtattggggaggcagcactgaatggggaagtccctggtctggtgggggacagccaccacctggcacgtgatggtggcaagaatgcctaatgcttatgagtgccgcagtgtgcagctctgtgccttacacacgtcacctcccaccatctcccaaggaccgtgtggggtggatcatacagtcaggcactgcataacaagagtctgatcaaggacagagcacatgtacgatggtagtcccataaaactatcacggagccgaaacctccctatctttctgccgtcgtaatggtgcagtggcactcattacttacgtgtgtgtggtggtgtggtgctgttgtaaacaaacctactgggctgacagtcttatcaaagtctagcacagacagttctgtacagtactgtacagtacacaatacttgataataaatgactgttactgatttacgtatttactgtgctatacttttaactgttattttagagtatactcctacttattaaaacaaacgttaactgtaaaacagcctcaggcacgtccttcaggaggtagccataagaaggcattgtcatcttaggacatgcagctgtgtattattttccccgaagaccttccagtggcacaagatgtggaagacagtgatatggatgatcctgaccaaggatcctgatccttgatatcgacgatcctggcctaggctaatgtggacatttgtgtgttagtttttaacaaaaaccttgaaagttaagaaaatgttacaaatagaaaaaagcttatagaatatggataaaagaaaagtatttttgtacagctatacagtgtgtttgtgttttaagctaagtgttattacaaaagagtcaaaaagttaaaaaaaattaaaaggtttgtaaagtagaaaagttacagtaagctgaggttaatttttaattgaataaagaaaatctttaaatttttttttttgttttttgagacggagtctctctctgttgcccaggctggagtgcaatggtgctatcttggctcactgctacctccgcctcccaggttcaagcaattcttctgcctcagcctctcgagtagctgagattacaggtgcctgccaccatgcccggctaagttttgtatttttagtagagacggggtttcaccatgttggccaggctggtctcgaactcaggtgatccacccgctttggcctcccaaagtgctgggattccaggtgtgagccaccgcacctggcctagaaaatctttaaaataaatgtagtgtagcctaagtgcacaatgtttgtaaagtcgacagtagtgtcctgtaatgtcctaggccctcaaattcactcaccactcactcactgactcacacagagcaactttcagtcctgcaagctccgttcatggtaagtgccctatacaggtgcaccattttttgtcttttatagattattttttatgtaccttatctatgtttagacatgtttagatacacaaatacttaccattgtgcgacagttgctacagtgttcagtacagtctcaggcacggtcagaggcctgggagcactaggctgtatgtagcatacagtctgcgtgtgtcgtaggctgtgccatccaggtttgtgtaagtgcactttctgatgttcacacaacaacaaaatcacctaacgacttatttctcagaatgtatccctgtcatcaggagatacaagactataattaggggtaaactttaaaggactttgttgagaagaccattcatgtggggcttcctggatttggttgggttgtggtacctcctctagtgatgcagagccttcctatgatttttctccctgccccaccccaatgcccaccctttcgatttgctatttcctctctccacctcaccccaacacccagtgctatttacatgctatctatatgatgtaagttgtgtctttacttttcagctgcctgactgtgaatttataatcactggtattggtaacagtaggctagttagttggtccagtcaaacaaagatgaactgatccctgctctgttgcttgtggtcagcaccacgtgggcacacaggaggactaatcattcctgtgtaaacgctgagaaaacaactaagacacatggaaaaattaggagctatctgcaggattctgactgtaatgtgattattagaaagccaataaggcagtggttagcatgaattggagtggtagaaaaggatttcttggaagaagccgggcttgagtgccatcttgaagggtgtagaagaattgtctggaccaatggtaggagtgctgggattccaggtaaggaaaagaagagacaccattccatgtgaaagatatcattttgacatataaacacagaatttccaaagttcagtctaagatcattcttagggtggtctgttttcattcattcaacaattacctatcgagcacctatcatgtatgagacacagcagtgcttaaaacacacacagttcctgccttcatagggcatccttctatctaagggagacaggtattcagtatctatttacataattatttattcatttataactcacctctaaaatgtttaggtttggggtgtgactatatttgttttaagttaatattttacgcgtgctactgaaaaaacaaaacccaaactaatgatcactgtatttcatggaagcgggggctgtctcatgaagatgacatttgtcttaaattatgattgaaaaaaatgttttagggtagattgtttgtagagtttttcatcctgctaaagtgatccctaaatcataaaacttgagacttgctgaatgaaagggataaaagagtgaggaggacctacaaatcttcatggggagtagattgtgtctgtttgaagtaaagccacacctgtcatgagggaccaggagaggcttctaggaggaaagagaacataccagggaaagaactgagcaaactttcaaccctctgcagtattagaggtggacaggagggcagcactatattggagagattgttaaactgaaaactcaattagcatgcacaaaaagtatatgtgtttaaggctgttttaactgttggtgagatgctgagctgctaagggctgcctgctgtcattacctattagcaagactttaaattctgacttgctgaagtacgtatttccccctgtagctagccatttctagtaaagcttgtttatttttatttttgtaaaaaaaatggttatagttaatttatccttttggaattggaagagcttcctgcctgaataacttttttttcttttcattttctccagtgtagaattgctggttttggccttttggagctaagtaataaaactctttgtttattctgctgggtctttgcttgtgttagagctgttttatctcaaacatttgtaattctataaattgaaatcagcttttcttacacttgtggattcctttagatttgaaatctattcttggttacgtttatagcttcaacacgcctctcattgtaggtttatacatgtgtttgcttgctcatttattttgtcatcatttgctcattttattaccagttattgagtgcctactgtgtaccaggcactgggcaaggggcattctgtgagagagggtatggtacctgcgggcttaagtagtccgtgggcttgtgaggaaaacgctagattaaatcttgattactgtaaatgtcaagtatggccaagtgtgggatttcgtggcaggagtgagctttcctggaatttgtctttcttgcctcaatttgcctgatagtcatttcatgctagggatgttttaaagtctctggggaggccctgcagtgtagaggaaaatgctgatccacaccagaaatgcgaacctggctctctgcccttgggcaagtcacttaaccctcctgagcctcagtttccatctgtcacttagagctgattatacctacttaacacccaggctttttgtgaggggcattatctcattagagataatgtttttaaaagctctttgtaaattgtgtagcattcaaatggaagttattgttatttttattattgagtgccttctaattcaacactgggatagtaacaaaagaagagaggggttattatcacccctcttccctgtcacgtttagattggggcaaggaaaggttctcaacctcgaggaatttatgatcagactggggagacaagaaccagtttgagaagcaggtaatggtagttgagagaagggatagagggctcaagaatctctccgcgcctttctggctccaaaattctacagtaggagtcaggaaaggcttcacttgtgaagtggcacttgagtgaggccgtcatcagcataggaatcagaatcatctttgtgtgctcatcatagtaaaataaatattgattgagtagcagtatgtggcaagggactcacaaatacattttggttgaggagtcaggttacttggataaaaaatgataatgaatggtacaaaattccctccactggcgccacaggaggggcagccccgggcctgaggtctttgggaaaggtgtggggaggcggtgggcacaggcctagggaagggcaggatttagacgaaagcagagccattggaaaggcatattctgtgtttccactattgacagcctcaattattggttttcccattcagctttctgctctcagtaccccattctgtttacctgctggtgggcagagcgtcacacaaccaaactcgcgtagccttcttcaccctttcccctcttttctgcagaatgggtttgttatgacttgactgtgatttttcaggcctttaatcatccaaggtgaatgtctaagggtggacccaagcagggctggacccaagcagggctgagttaactggacccaagcagggctgagttaggggaagcagggaagagaggggaaggacagcctgagcccttccagacacaggcaaaggagagaggacagacatatcctccctgagagctctccaacccccccaattatcaaagcaaatcaatgtcactctaagtcatatctccatactagctctatcctttctcctgtccctatctctaggtctataaattcagggcttaagggatttctagggaaattacagcaaacgaatcactgagagagggggggaacctccaaaatgttgtgagttgcttgtttaatgtttcaggagcttcaaagaaattgagcaatttagattaaatttcaagaagtggggctgactagagagagaggaaagttagaaacagcgtgctatagaggttgatggtgggaataaactctgctgtttcagccaggccaggcttccttccagtgtgcttctgtatgatgttaataaatgggaaagtgattgacaacttccttaggcaactttggggagtgaaatgccaaatttgggcaaagcagacctctagctttattggtattggggctttgccagaattatctgctattaaatacttccagggacctgttgcctctttgtgacaaatgttagataatttccattaactgcattattgatggagaaagcagaaaggtgagagagtggagagagtaaagattgaatgagtgtcagaactaactggaggaagagggaagataaagatgtgaagaagtatatatctgaggataaaatgtaaaatgaaattaatgaaaatacgatggtcagattggaaggagagaaaatgcaaattacagagtgaaagaagacttctttctactctcaaatgttttggggggattttgggggggcaaataggcagtaggttttcacaccttttgaaaaacccacctcttcacacttgagttttcatgttcttggttcataatcctaggattaccattgtcagttgtgcagaatcccattggaaagcaatatgccatcagtacatctggtaacaggaggatgctaggaatgggaatacagaatatttatgcaacttctaggcttctaaaaattgtatgtttacatgcatatatacacatacatgcacacttatataaaacctgtcaaatttttcaaaaatttttgaaaggattagcattataaagtcataaggaatctctgaagggactttagagtagagaaagatgtgagaaaaagcctaaatatatcactctgcagcaaaccaatcatccacacaaccacagaaatctctgataaatctcttatgaactaaactccctgttgcccgatggttctttttggaaactttgtctctgtctttcgtattgaaatatcgcactgaaaagacctgccatggagatgttgatcccacttatgggcaagagggcgtctgaacttgtcttccagccatggctcaaagattgcagatggaaatccctgctgctcacatttgtatatttgatcaaactcttttcatggccagaccaggctccaggggttctgggtcacatcttccctctagctgccatttactttgatcatactagtaatgattaccatctacagcatgtattatgtgccaggaactttgaatttgtcatctttttggttttcttgggacagggtctcactctgtctcccaggctggagggcagtggcatgatctcggctcactgcaacctctgcctcctgggctcaagcgatcttcccacctcagcctcctgagtatctgggactacaaggcatgtgacactacacccggcgagtttttgtaattttttgtagaaacagggtcttgctgtcctaagctggtctcaaactcccgggctcaagctgtcctcctgcctcgacctccaaagtaccctccctccctgcggtctggaggagttgccttgggacctgtgcttccttggctctatgcactaccagacgcagtccagtgggcagcctggcgggtggccctgggactcattgctttgcagcctgtctggaccatccctaacagtttatttttttgacttttccagtggagagtccacagagaatatgacttttccttgggtcatctgtaaagacttggcaagggatgtcttgcatctgggaagatgtggtcttgggggtcacctaagcagcagaggaaaccttgcaagatgacatttggggctaatgtggaattaactaatagactgatgagtttgcttgatctgagaactcacaaaggatgttgaggaagaaagggcagctatgacctatcttggggttttgcattttgttcttgtgaccctgtggaaatgctcagatgagtgcacatgttcagactcatgccaggccagtgtgaagaatcaagctgagtatgcatccttccgaggctcaaagccaagagaaagaaagagaggcctggtgaaatatcataggaaatgtcacggtcttttctggactctcttaaaaagcccaagacccatttaatatttcgattgcaagacatatctctactggatggtgttttggaaagctggagtttaggaaaatcctggctgtaggaatgctctactgctgtgaacattcccgctttaggaatgctcatagcagtagagagtgggctactgacttttctggttttcaacagtatcttatttttcctgaacatttattaactgtctgccctatcagagaacttctcagattgggacttcccttgagtaagagacaatgacctgaaatgcagggcgagagaaatttctttcagttttaggcggaaggtgggacccaaatttaagagagccaaccccaagtaaggaagatcagctctcactgggagctgtgtaggacccaggggggagcacaccccaggaaagggctgccggtggatccggaggcctgacctggggcccaggctgaagtagaacatcagcacctctagtagcccagcaatttggatagcaggcagagtttaaaggaccaaactggaattatgagtcaagactgggcaggaagcaggaagcaaggatgaggagccaggttatgataactagtgatgcatggggtgtccaggcccagaggcactaaaagggggtcaaggacccagcatggagactgggtaacagagagccatgctgtgctcatggaatctgggcagcaagagtagcagctcccagaggggctggctggcaaccttttgtatcagcttaggaacttttcatgttggtcaggagcagagacgcagttccagttttggctggcctggagcttgcaggataagcccgtgtctggctgcactgtaaaaataacacggagaataggatgggtcttgtccttggtctctagagcagccactacatggaagaaagaggtagaaggcaggtgtctatcaagtgacatcacagaactcaagaggagtgaatgtcacctccattccccagtctcccaacattccctggggaacagggcagagggaagacagagtaggggaattccaggataagcttcatgcacccagaatgtggaatgctcaccaaagaagaacaagagccgtgttcacatcatgatattccgccctcttaattcccaaacagggctcccaggctacagagcagctttgataacagcagtgcactccctctcctctagaaagttaggtggctttaaaataggtaaggctaatttcattccttctgtgagttctgatgaaaggggcatttggcgaaaaacacgtgtgggttggcatgcaatgaatacttatttacatgggtgttttgaagacaatgacacagaatcaaaatttaacccacaagtttaggttttcagtttccttctgcttctctcctttgagaggtagagatggagaaactgtctctaccgctcttattttctcactctgataacaatcttttccattagtagagtgctatataaggtacagtgcacttgggaaatgcctcttgggaaggtgacatgtaaaaatggtggtcaacgccacttctgggcaggtgccaaggcctgtagcagcctgtgtctttgggtcctgcatgctttcctttgtgttggctggttcctctggctgagttcactgttggtctgtctgtggcaattacggagaagcatgacagtcacagcttccctgagttctactgaactcatgaactttgttcataacagactctacaagtggtacaggattcctatggccacaactcaactcaactccgtagaaatcaatgtttatggatcattggagctaaaagaaaacttgcagatcagatcatctcatccaattccctgactttacagaatgaggaaactgaggcacagtaagatttttttttttattttttgcccaggtctgaataaaattgaaggcacccttaccatagccaggattctttgtatataccactggctgaccagtggtagctgaaaaaaaaaaaaaaagggatttgagatggtaggaggggtgtctgactgaggagccatttttataggtttttatagacatttgcattggtttggagtagcagaaccagaaatagtctttcccttttcaggagcaactctgcacagaagactcactggctttggactctgtccctatcacatacatttcagtagccaggccaaggcatctggctgggaggctgggtacgtctcagagaataagcgcttgtcatagaatgggtcgtgaagctgggcagagagccaggtttgcagaaatggctttgtattgatgaagaagggagatttttaccttgtcttggcctccatcatgaagagagtgttacaaaaaagtacagatgacagcaggccactctcggagacacacacgaagcttgtcttcctccatcccaaatacataggtcagtggaccctcaggaatccattctgatgcacgggtggatgagccaagggctgggcagaggccatttcaatagcttaatgcttgccaggtatatctgagctagtgctgccccagggacagagtatcctctgggagatctgaaccaagcgagggtgtggcagccggtggatgacttacagtcagcctatctgggcagattttaaaccctggcgtttttagtgccttgactagtgtgagaaacttgaaactcagtctcattgctatttgtggtaatggtcatttagtttcaggaaaacatcgatggtgcccttccctagatagctgcgttgcaatggaccacattatggcatgcacattaatgtagggattgttcatacaaaagagggcaaagatgccacttgtgacagaaatgactgttacccagtgtctgttctctacctctttcatagggatagaattttcagctgggcacatgactgcttagaatgaagaactacagttctcatcctcccttgtggctaagtgaggttttgtgactaagttctagatagtaggatgtcagcagaggtgatgcgtgtgacttccggtgtgtgcccttgaaggcaaagtcatgcctgccctttccctttctccctctgcaggcgtgttgccgtcatggtgaggagccatttcatatcatgcagactaaaagaccctttccaggtgctggagcaaccattcagaaggcggtgatggctgggggagggcttccatgggagagaggaagtaaatgtctctcatggggaatccctgttgttttggtctctgtcaaccatggttcaattcataacttaagttataccctacttattgggaactttgattttggaaggcaaagaaatttaaaaattaagaaataaaaataaaacaacagatagcacttggataagttggccaagttcaagtaacacaaaaaagtcaggacatggaaccaggaggtggaagtgccttgtttctcctcctcctctttccgtttcccatgtcacccacaggactggtgtgcccggtaggaaagattggtaggtcccactggtcccgagtgtcctacggccctttatattggataatattggaactggattctcctagagattgggaatggtggcagaaaaattaaaattgggaggtgaaagctcaaggaggtagttacaaagcaaaggaaaacaaacagttttgggcatccagctgcctttcagtggtggtcactatggcagagatcagcagagtgaagggctaggagatagactcatttcggatctaactttaataatcaattttaatgacccttgagcgaatggagcagttgattttcctctcaatcctctctctgtgtctgttgttcctgcaaagcctattgggacttgcctgaggaattggcccttatccttgaggttaatgaaagacaacactcaagaagcttcccacttacagaactctttctccaatttagaatggaggctacttttttttttactgtggtaaaatatacataatataacattcacattttaaccattttaaagtggcattgagtacattcatactgttgtgcaaccatcacaaccatccatctccaggactgttttcttcctgcaaaactgaaacgctctacctattaaacaatcagttcccattcccccttcccccagcccctggcacccaccattctactttctgtctatgaatttgaccactctgggaacctcatataagtggaatctcagagtatttgtccttttgtgactggagctagttttggctaagtcatgggagaggcaagtggatcccttgctggtaggaaggacagggccgtgttgacagggaccatgaggcctccgccctgcagttttcctttgtcctctgcgtggggtggggcagccctcttggggaaaaggctctcctcatttcatctttacttttccttcctgggagatggagcaaatggtgcctgccttgtctatttggagcacacaggcatagatcattaataagataattggaaggtacttggcaaaatctgaaatattaactgtctcagagaagctgaataatcacagggtctcaccaagtgccacctcaacaagtgcagctttcacccgtccttggacatttatttccctttgtctgcactctgttccctttctcccaaaatgctgggtagaggttctttaaaattcaagaaaaaaatcagacttccccttctccccagtgacattcccggcctcttctctcactcgagtgatttcctgtatgaaattcaacaacaggtccacccagaggagttctttttcctccagcttctctgtttaaaaatcttgggttcttcctgacaaaaggaggcttagtcatcttcccccagtgacaggccctacttaaaaacaaacaacgaagaaatcctacatcccactccagcttgtgctgcagagcctggccggggagggacaggggatggtacacttggaaaggcaatcaaagagtgggcggtcagaaaacaaaacctgccaggttatcaaaaggacaccacctccaatgcacagagctgcttccttcccgcacacacggaatcttcctgctccctgccccactcatcgtggtcgtggccagctgtgtccagcagcctggcgcccacttaacaaacaggagcaatgagggagactcctcacccggggccagcagtgggtcagggaagaggctggggttagggctcaggggtctcaacctggagtcctgtgtttgcagctacaactccaaggccttgggatttgcctagtggggaatcctgggctccagggaagaagtcactgaaggtttaccaggcagacttataaatggggagaaactgaagcctagaacgcccccctctctgatgactgctgcctacgctgcctccttccttctctcagctccaaaggcacagaatgtctgatcggagagtttagctgctttctactgttttctcacagtttcgtttatcagccttgtcttgccaatgatacagaagctccccgcaggacagtgggtaggtgggagcttcccgatgatcatgttggtgttgacaaagctccccaaagtggggtattccctcaggctggtctccggagccggctctgtgctctgaaagcggcccatcctgccgtcctagagtataggtgccgtctatctctgtgtgttgagttatcgggagatgaaagatttttttcacttggtgaatcctggcattgtgggaagactctcctaacacagacataattctcttgcaatcccacaggcgcacacatacacagaggcgtcacacacacacagaggcacacccctggtgtgtcatgggcgttgttttgcgtggagaacgtggagcgtgaagacacattttctatgacagtggttcccttggtgtgggattgatggacctgtggacaacaggagttttgttagtgctcttcagggtcccggagatcatgtactagaacacctttcctccacagaggaagagactgcaacccagagagctttgtcacttagacacacaattttactttgcttgggcttcagtttccctatatgaaaagaaaaaaaaaatagaattgccccaaaggatcttaaggactttttcagaattccgtacataatgagtttttattgtcattttctcaccattctttggcctttgtggaactgactagaatagctcaattgtttgttaaggaatttctgacctcaatcagttttccttatataaggagttaccagttttagagcctcatgtcacttggggctgtgtctcacttaaaagtgctgtgagagcatattggattgctgaaaggagaaactgaccacctcttagaagacatcaccaattcaaatgagggtgtctcctttcctagcgaaaacgggcacttagactagtttagagccaccggaggtgggaggatgagccagatgtccctggaaagccagtttaggggtgcttttctcatgttttccagggtttaattatgctccgtgcttgagagaaatatttttgaacctgaggattttttatcttaacgttgaacaaattatttatctttctttttctgtcccctccatagttccccaatgactctaatttttattattgttataaagcatttttccttaaagagtaaagacgcaaataaaaaaaatctgcagcttagacacaagaacaagagtgaatctgacagacctaaggttgagtgaaagaaacatggcaaaggggtgtgttcagcaggactccattcctgttaagctaaaaatgggccaaatgaagctatcttttaaggtacacatacatacgtggcaaaagcataaagaaaggtcaagaaatgatgatcgcaaagtcaaggtaatgttgtgtttctggattgatggtagttacatgaaagtatgctttattattcattaaactataaaaatatgtcatatgtaccttttaaataaaaatagaataaagtgacatggaaatcagaaaaaagctagtagcgtaaaaattgcagattcatatggtgggttgaatgctctcttccaaaaccacactaacatgatggtaaaggaatcgttaaaaaatgcataaaccacaaagacaaaatgaatccaaagaagacatcacccaccggtgtttatttgttcatttttttgtatttgaaatactctttgatgacatatttggctttgattctttggcgctggccttaacaaccatacagctgcaaccagttgcttacagggctttgcttttctgctgattttgcagaggccttctccattcctttagtttgaccaacctcagttaagctgatgtgggtgtcaacaaacagttcctcaaccaggtttttctacatagactcatgagggtcagatgcaagtacccgtgaattccacaagctaagccatcggggatgagggtggtcttcagcacccttttgaagcagtgttaatgtccatttctcccccagcagcaatgcctttcttggccatggtggaggcttaaggttggagctgaatgttgaactcactggagatgttctgccttcatgcagcccagtggcagctgggaaagctggaaagtagatggacaagtagtaacagactttgcatgtactgtatgagacagctgaatcctaagcggcagtggggaaaattgagacacaattaaacttgcagctcacaacctccaaaaggcttggaaattgtggtatcaggtatttttggaagtgacggttaaaatggggctaagaactggagaattggttcaacgtttgtattcttagaaaatgctaagagtagatggcacagtgttctcaccacaaaaataataactatgtgaggtggtgcatatgttaattagctagattgagtaattccacaatgtaaacatgcttcaaaacatgttgtacacagtaaatatatataattttatctgtccattgaaaaaaattaattagacctcagacccctactcctattctcagcaactaatactcttcccatttcagctgaggactggaggataaagcggaatgttctctaatggggataaagcaagaggtctgcatgggggcaccactggcacaatggagggcagcacgcccggggcgaatacagggctgagacttctggagtatctcccacttgctctcagagtgctgtcccataagcctgtactctctaggcagaagatctgcgtggctttccctggcagagtggaccagcctaaagaggacagccctaagggggccctaagatctagccaacagggcgttccagctgtggggccttagagcaaagcctagtgcatcataagccacacctgtgctcacaatgtcccatcagtttttggtggttctctcttaaataaggtccatcagttaaggatccctaaatgtccctaaatatcttaggaaggccttgaaaatagaaaccaaagctaacaagcaaaggatgcctatttaaatcagaatatacacgaggaaaacttaaaaaaaacacattattttctgtctttagagggataagatattatatccttgatacagaagctgattgctatgtaaagggaaaaattaaaacattgataattaagaaatgtgatgactgagtgctatgaatggttagaaaacaaaattgaagaatatccaagaaagtagggcaaaaaatcagagatggaaattaggagtaaaaaaaatatgaccattagacagtccaggaagtccagtatctgaatactaggagttccagaaagagataactacaaaaacagaggggaggaaatcaccaatgagacagttctagtacatttgctagaacagaaggatattagtatccagattgaaatggctcattaagtgcccttacaaatagatgaaacaggcctatcccaagggtacatctttgtgacatctcagaaaagtagggacaattggatcttacaagtttctaggctgggcacagtggctcacgcctgtaatcccagtaccagaggcagaggcgggtggatcgcttgagctcaggagttcgagaccagcctgggcaacatggcgaaaccatgtctttaccaaagatacaaaaaattagcgaggcttggtggtacgtgcctgtagtcccagctactcaggaggttgagatgggaggattgcttgagcctgggcgatggagcaagactctgtctcaaagaaaaaaaaagtttctagaaagaagaaatgtattacaaaaggtcaggaatcagcctgatttacccgcagccatgtgggaagctagaaggcgaaggagaattgccctcaaagttctgaagaaaaatgatttccagttgacaattttatatctgatcaaactatcactcaagcaagaaggtaaaagagaaacattttcagataggtaaaaatataaaacaaaaagaaaaaaataaaacttagcccgatgcaccttctctcaggaagctattggagttcttcaccatgaggagggagtaaaccaagggaaacataggatcccggaaatgggggccaacacagaagatggagtatgtgagagggggcccttcatagtcgtgataaagtggatgcaggacattgatctaaactaaatcatgacaaaactattgcagaggatagggaagaggtgaaagagggctaaacccttaccttctatgatgaggaaaaaaccttaaaaatcaccaaggggctacataagcatattattaaaaatatggaatggaataccaaaagaaacagctaaggaattgaaagcttattgttgttgaggggcaggttggggaggggggtaagaagagaactgtggattttttttcttcaatgaaccttttagaacaaattgactctttaaattatgtgtataggccgggcatggtggctcatgcctgtaatcccagcagtttgggaggccaaggttgggaggattacttgagcccaggagtttgagaccagcctggacaacatggcgagaccccgtctctacagaaaatacaaaaattagctgggtgtggtaacgtgtgcctgtggtcccagctactcaggaggctgaggtgggaggattgcttgagtctgggaggttgaggctgcagtgagtgcagtgagctgtgattgtaccagccttggggacagagtgagaccctgtcaataaataaataaataaataaattaaatgtatgcataagagataaagattaaaactagaaaaatgaatagctgattattggtgtttatctcctttagatttctttctttctctttttttttttttttttgagatgggagtttcgctctcattgcccaggctggagtgcaacggcataatctcggctcactgcaaccttcacctcccgggttcaagcaattctcctgcctcaacctcccaagtagctgagattacaggcatgtgccattacgcctggctaatcttttgtatttagtagagacggggtttcaccatgttggccaggctggtagcgaactcctgacctcaggtgatctgcccgcctcggcctcccaaagtgctgggattataggcgtgagccaccgctcctggcctagacttatttcatgtaagtaaaacaagagtcctgtgttgtccattcatttattccacagattttgttttgagtatctgttatgtgctgggcattgaggcaatttcttttctccttatttccccttgttttcattgctcctgttctggaccgtcctgctgggatcctatttaatttgctagttaccacctgccctatacgcctctggatttctgctgggtgtggctgtggccctagtgcgatgtcagggaggtcttacttaatgcttctctcatgctctccagtggtgagttgtcagaagtggtacgttttgctttttcttctgagatgggagaagcgtgctgtatccacagattcctagctggcacagttgactgtttatttgcttagcacatggcctgacacatagcagacactcagtggctgaataaacatggtaactgtgacatgtactcactttctctctcctgtctctgatcctcaaagaggaccaaatatctgccaccctgcatcctcagacggctcgtaactttggcaaaaaggggccaccacagagggcctgctgcagccttcccagttccctgttgtttccacttttgctacctgaaatctaatgatttgagatccagtagtttgcgtcttgaagaatatttggaaattaaggaaaatacaggtgtccctaagaggaaaaatactatgacccatcatcacagtaatttccaacctggagctcccacatgctgggatctcataacaggcataatggtggccagagagcacttcttaatatttcaaaacacctaatggaaactgcccatttatttaagataaggctgcaaagagtaactaaaatggcaagtttctttgctttccagtgaaagagtatcgatttggtatggtagctctggttattttttattttattattattatttttgagacggagtcttggtctgtcacccaggcgggagtgcagtggcttgatcttggctcactgcaacctccgcctcccaggttcaagcgattctcctgcctcagcctcctgagtagctgggactacaggcgtgcgccaccacacttgactaatttttatattttcagtgcagacagggtttcaccatgttagccagactggtctcgaacttctggcctcgtgatccaccctcctcggcctcccaaagtgttgggataacaggcgtgagccaccgcacccggctagctctggttatcctttgctgaacagatgcttgagttgatagctgtctatctgtgataaacacaagaatggaaggagagaataatgatcaataacagcttatgtgattgacaagaccttgccaaaggcagtgtggatgtggtgggatgggaagggggtctctgggaggggagagacgggggcactgcatgctacttagttattcctggggtttgttggcagctgcactgaggacagagggctccagacaggggcagagcaggggcacagagagtggtgtgaggctctaaacgccagcttggtcggcccactttgtcattttgctgagggctggtggaggtgccggtgtggctgtgccaggggccccgcctgtcacctctccctgcaatccagaccccatcacagagcccatggcagcggagataaatgcttcggcaaggcaaacgaatctagagggaatgggagcctcaagccgtgaaaaatgatggggactgtggcctactttcttgctttgtaagagtcacttgcacttttctggggcacagccaaactgacggtgctgtagaacaggatgtgcgagaatgctgtttggcaaacaaagagcgctctctggcccccagaggttctggcttttgagcccagactaaagaaagccaggctggagaccgtatatcaaactttgcaagcccgtttatataccttgctggtgcctcagggggcagaaatgctggttggggatctttgtgttttgttttgaaagagtgatgtttggaagcagaagcactcaaaaatatatcctgacctctggcacttagaacctccaccagagcttggcacttaactgttctgtttctcgtgatatgttctaattatctgtttccagccagattgtaaggtcaacaatggtagtttatttacgagtaagtcttagttttctcatctgtaggaatggggataaaaatgcaggtttgctatgagtgttaggggttcagggtttagttttgggcctaactgctcctgtctacctgtctacccttccagggcctctcaggacacaccttactcccaaagcacaatatccaaatggcaaagaggttgtccctttcttaatgagctccacaagcacctgaccaccaccccctcccattcgaggcctccctgtcccctcccgctgaacctaaaccgctctgaggagcagctctccagccatcagtcctgcttggatgaggatgctgattttgtgtctagggaaacaagtctgccccgtttgccttccacatggaggctgagggtacaagagaaagttgggggaaatagcaagcaaagttcagagggcagtggtccattttttcttatcagccacaaaacaaaaaataaataaaagaaggaggaggccgtgtctttgaggcacagtaagcctgcccactgaatgtccctgagagtaactagttataatagctactccttctacagggagacctagagacggggcagagagaggaaaggacgtgcccccgtgaatagcagaggggtgaacagtaggcctgggggagaaattgccttcctgacaagaagagttggagatgatgaatacaaaacccctgggacactgcctggcccatagtgatgttaccatcagtagtggctttgccgtttccagattgacatccatgccctaaacagagaactttgctgagatgaaatttccttgttggtatacttttgtgaaccactccattgagaaccagcacaaagccattgccttcttgaacgtcttcattaaaactagaataatctctgcccctcatttgcccatgcacatggaaaacccacggatatgccttccctgatggaaaatatgaccactgactggagttcgagaccagcctgaccaatatggagaaaccccatctctactaaaaatacaaaattagccaggcgtggtggtgcatgcttgtaattccagctacttgggaggctgaggcaggagaatcacttgaacccaggaggcaggggctaccgtgagccgagccgagatcacgccattgcactctagtctgggcaacaagagtgaaattccatctcaaaaaaaaaaaaaaaaaagtgaccactgaaatgtgtataatgctttaaaattgacagtgcattttctcatccatcatttgagcctcacaacagccttgtgacgtaggcagtattcgtattctcacttcaaagataaggaagcggatgctggaatggcttgggcaccaggccaggttcatacagtaagtaaatggccaaggcagggtgtaatctttggactccacacccagcgctccttttttttttctgtcatctgtgatgcttcttccaccctgctattgatagcctaggaacaagatgtgtgacttttcttaccaccccctggtgggtacatcctgggtacacttttctgttttctagtgggggtaaggaaaatggctttcagtggtgaaggttcacagaaagaatgggatccagaagcgtcttccagcatggtccaggtgccagaagactttggcaggcgagttgaccatggctgagtcaggccctcctcccccgctccctggattttggatcgattttgcagcggctctggcggctgcatgtgtttcccttggcctctgaggcattccagtgatgatgatggctcggcggggtcacggccctgtacaaagcaagggctatttgtggctgatctaaaacataactggagccacctgcatccgaggctggcttctcgggctctgggtcccataacccagctggagtaaaaagttcacgttcccgtgtggagtagataccaaaagtgacgtctctttctttctttaggtttggctgcgtaattggaaaaccaagctgcccgccaccttgccgtggcttcttctatccctagggcctggagtgggcttcctccctcccctcctctatctaaaccctccttgctgcaagaccctgctcctttcacggagtctccattcccagaatgtatgtgacctcattgtttgtcatccatgttggggcttttaagaatatccccttgcaccattttatgactgcttcatggacaataatcctgactgtgttctttggggccagacactgggtctgctttccttcctctctcacagtgcctggctgtgctgggtacacatgaaggctgacggttcactgaatgaggcattgtggagggcgtagaaaacatggagacctgggaacccagagaccaggttttgttgccagggcaaatccctttgcctctctgggttgctcagtccatatctgtaaaatgagagttgaactggatgatctttaaggtccatttcaaattcaaagttctggaactaattgtagactaagccgaagagatgctcattgcctttacctgtctctctctgctccccatattgcagcctggtaagctgttgtggcttatcacccgcacctctgatttgcctgaatgtaacttaaaaacttgtcttcataatatcaggaaggtcacaaaagagaatgagggagtgttgagtagtgtttagaagcagagactggggaatcagacaaacttgggtttcagtcttagccctaccacttaatagttgtgtggccttgagcaagtcaccttgttaagtaccactttcttttcagaaacatggagttaatgccagtctcacaaggcaatggaggaatatgtgagataatacaggtatggcgcacacacagtgtcagagctcactcaatggtggcagtcatcgtcattgaagtggggaggggaaagaagcagaggggtgtgttttctagtcctttggtgagcattttctgacttgtaaactattggttgcattttaagacagtgcctttatcattttcataagcagtgtaatgatttgaggaaaaccattttagttctaataagaacactagcagtactaattgtgcacatgatagcattttaatagagttccataatttatggaattgggaagacttacaaaaacatgggttgactctctagagtcttaggtttctggtgagtgattcaaacaggctgctcttgcttcctgccagtgcaaataaatcaattgtaaacctgcacttttaaacaaaattgtgaaaaaggaaacaaatccagtgataagaaactattttaacaagacacttcattcttgaggtgatttgctaaggagagattttccagattgtccctgaactaccaaaagcaacagacacactgtggtacttgcttctctttttctagctgctctgggtttaagtaactgaagccttctcaagtattaaatttggagggtggctcagtgatctaagcaatgaagacccaagaaagactttgggtctgaatcaaagttttccaactgccttgctttgagtgcttggaaagtcacttcctaaccttggatacctcaatcttaccaactaaaagagtggtagatggcgggatgaacatcgcccagctttagacagtgaaacctggatgaacttaacctggcttaagatgatccctttctgtttaagtggaaaatgcatggtgagtgaacattacctttcaagcaacttctggacagagtccatatgtgtgtgtgtgtgtatgtgtgtgtattagcctgaagttcaagtacttgcaaaggtttctagcacacagtgtgcagtaggtgagctagacttagttagacttaggacttccagatctcccatgtcttgacaattgtgtttaactgagttttaacattgactctcagagtcagaaagaattccagaagataaaggaaaaccagaaagccaaactttaataaatactcagagagcaaaaagaaataatggaaatggcatacgtgcagagggcacgtagttagtgaagaaatagcttttgatgaaacaggacagggtgaaacttcaaagacttgtcttttatccattaatcccattagtgctccagcgatttctcaaagattgattatctctggggaaatgtgttacatcagccctcagctttccagtcccattagacccagcaaacattctgtgctgctgggatgatgggcttctgtgccatgtttacccatattcctccagcttggccccctcctcaccagctccagtcaggaacagagagaggcctctaccatcagtagtcattctttgggattatcactcacacccctttggaagggaagagaaacataaagataatgggcaagcagcatgtgctcaggttaactttacattggctgatcaattcttcatatagccttgggcgtttattaggactttcatggtggatagacacactgtccccattcaaagtgcctctaaattagaagtgagatacctaaggagtgtcagcaatgaggaacaatgggcttctcttgaagtcttgctctctgtctagtatggtgggcaaaggaatttatcggttactaattttataaataaccttctcacagtctctgttttgtcatatgtaaaatggcagcaatgtaatgtatccctcatagcgttgttaggaggactaaatgggttagtatttgttaaatgcttggcattgtgcctgcctcacaccatacaggcactcaataaaagttagctgaaattatgttaactagtctaagcagaggattagtaggcacgttggaactgatgctaagaaggaataagactcaccttgggaaaagtggggatcagggagaagactaggcagcaggcttctgagtgtgggagtgtgcaggatgtgagcacatctctgcagtgcctgcgccctccttgccacagaaataacctacaccagacgtagtaacagaaaaagaacccaagcattttcaagacaatgtgagcaaggtagaaaagggcgacccatgagtcaacaatactcaagcttttatcagtctcagtttcttcattctttgtttcattcattcaacccacgtttatcatcaaacctgtgctgttgattgatgttatagataaaaatgaaccactccctactctcaagaaagcagaagaaggaagcaggtaagtaactagacaattatataacaagttcctgagtgatcaggaggaatgaagtgccctgggaaggcttctgggaggagttgattcctaagattagatgagtgagagttatctagtgaggggaaaggcatggatgacagagcattgtgtgtgacaaatccttgtctgctaattctcacatttaactcatctcagagtcagtctccattgattgcctattaagtatgggccatatttttatgtctagtaattttggattatattctagacattgttgatggtctagtgtagagactatggattctattatgtttctctggagagtgttgactttttattttagcaggcatttaatttgactgaactcaaacaccaaactatctcctccatggggggcagaagctgaaatctctgatcagttctattaattttagatgggttgcttggaatctgccccatgcatgtatagctcaggagtcagccacagatttggatggagtttatatgcagaatttggagcatcccttctgaggctttctccttttggggatttctgcttccattttccagctgccccaaccatttgctccttccattttccagctgcccttctgatcctgcagatttctatctagtttctaatcactctatatactacagattgggttctgctctcaagcaaaaaactgtgaaacccagaaactcatccaatgctcccttctcccaggttctgcctgctttgagttgctctctagtgcatgcaaataggtatttttaattttttgctaagtaatagttatgttcagatgataggtccaatatacactactctgagatattggaagcaaaactcccacaatggatatttcaagaactgcaagtaggtcagtttgtgtgtgggggggagtgtttgtgtacatgtgtgcatgcgtgtgttacaggggcatggaaatatgcacagcttaaagaaaggcagaggtcagatcatcaaaagccttctgggttatattaaggaatttgaactagatcctgaaggctgtgatggagagctttaatcttaagagtaaaatgatcacaactgttcttagaaacattgctgggcatctgtatgaaggatgaatcaaaagaggtagaaagataggggattgatggggaaacagaattcagtttttgtcctctggaagatgaggggttgaactagatgatcattaatgtctcttatggctctagtattccgatcttcccattaatgactttacttggtcctactgtagccaggagttcccacaaggctgttttttgcagagcactatacacagcccttgaagcccaggctttaaaaaatgccatttagtgatattttatggcttgtgaatagattaaggtaatggaggcacaaaacaacacaaatgaatgcaccacgggtgggtaacagcctttgaatttctccagctctcccttcagacctcctgtatcacaacaggtatttggtcattttatgtgatcttaaatggcctactattaacctgactttgattttttttcagtcctcagagaggtggaggtgggcctagcaagaacccaatgctagggattcattgcaaagtgtacccaaattgggaagggtgagaagctattctatgatggtcttatgagaacctcaggagatgctggtggtggtgtgatgggcatgttggtttcatcctttcctgtttctgaaccaataggaaaatgaggcttcctgagcctcaggatgccctaccctttctaaggcttcctggagagcaaagagttcctgctctgccctggtgtgagtcagagactgtgatgacacactgaacagcaacacctgtccttgctggggaggggatccaaagtccagccgctcgccttcagcatgacacatttttctgtgctttgcctcgttaagagctcaggtcctttagtgcttgaaagtagctgagtgcaccacctctgtaaatcgatcccgcactcagttcgtgaaacatcaggttttaggaattggagaggcagcaatataatttttgtgtgctgttgcttgagtgaactgtaaaccaaggctttctacccaggattgcacggctttttactttgatgaatgtcattttactcagagctgactaaatgatattgtcttatatggctctcaaatttttctctgatctgttcccaatctgaaacgtgtgagtacatcacttcagatatttgctaggcatctgagcttggcctgaggatattcaccagcatgattgagaaaacatgcttgtcctcaggaaggcccaagtctaagcacctgctcatgccccttccttggctgtgtggcttttctacgctgcaaaccaagcttgtagacatggtgtacctttccataacaggtctctctcttctgtcatgttgtggtcactgaattggatttggcagaaataccagaaagtggaacatgtggtcgcagcatgtgaccttcaagtcaggtcacggctggcatttgccagcctctgtttgttggttctggtggaatcaggcctatgtgtggactctgctcctactatttgagggcattgtgaggccttttctgagtgtgtctcctgcctccttgactccgggcctgaagtttctgccattgatgtaactcatatgtgttacagcattgcctccagaattctcctatttgtgaaggcctattctgttagaacaggttgattgaggagcacattacctacttctggtgctccatctggggactgtggacagcagaagagtggggtgaggtgagcttgaggggttgagggagagtgacacagaagagcagggctggctcccctgaaacaggaggctcccctgtcagttgtggcaggctctctgcctggttttttccactcctttatccccagcacttaacctcatgtttggctcatagtagatgcttaggagatgaaagcctcatgtccaaccatggccaacagttaaatctgtgaatctcaggcttgatttcagcttggccaggtctgagtcattaaaggacgctttgcatttttggatagtggaacttttgccatcttattctttttccatggtgtcatggctttggcatgatcagggttatgaaaaaagggggataagccctctactctgctttacctgccgtgactgagatcagacactggtttttagagggaaatgtccattttagagcaagagagagaagaccttaagcatgacctaaagaaaagagagaggccaggctgtcccaccacttcatgcttggttgactgagccaagtttgactgcaagactgggtcttggcccaggatggagaatattcactaatgaggcaattgacttcaagaagatcaaaataattagtcagttttcactgctatagtgagtcacccttgtgaagacattatgttccaactgaagagtgagggagttgaggtggaagtctcctggctcctgctccctggggagtgcagagtgtgtctagaagcctgggctggtaggccatggagtggggacctgagctgtttccttctgcctgtgctttttctctttcctctcccacgttcactgggaagcaaggaagttgaggacacgttacctcagtacgtaccacaatacgcattagaggtctgcttcctaggcccgtagattctagggagggcactccaggcctgcaggggccctgaggcaggggttggtgggcatgagaatgggacccacccctgctgcttgggagggtatgtgttgcccttggaggcagggagaagggctggtctgtccctgtgcttgggcactcccatctgcacagtgccctgtggcagggagagatggcctcagagcctgtggttcctttaccgtggatggcttttcacgtgtggggctggattgctgagaacatcttttacctggcggatccctgaataggtgaggtggactcgggtctggaaagttaatttacatcttttctgaaggccagggaagggcaggggcagcctgacctgtcagggcgatacagtctgtagctgtttggccagagtgagaggagtgtctgatggaacaggacttgccttggaactgagcaaactggccccgtagagattaagccttggacctttgttcgcctgagtcccccaccccagccagctcacagataggaggctggagaagggagtggggtggatcacacgccatccccacatgctctctgtgggcctgttctctccacgtgcgaggagggatgagcattctgcagggagtccgtcaagatgagtccatggtggaaaagctcacagacggggaggtggggactccacagggttccgccatttcctgggaagggaaccttaggaatgtcacttaaactctttgagccttctttctcttctttcctccctcccttcttcgttttctccctctcttccttttccccacaaatattttctgagtgcccatcaggagttgtaaatgctggaaatgcagtgaagaatagcatagacaaggctggtgctatggcaggaagagagggaaaaatgaagcaaacagctaagtcagtcagactttcaaatacgggtaagtgctttcaagaaactaggataacaggtggagaggggcatgcgactatctcagatagcagaggagaggaaggcctccccgagggaattccacttgggctgtgaccctgtgataaagagccactcatgataggtctgggaggacggccactatgcacagaggcagcagcacatgccatggccctgaggagggaagaccagtatgcagatgaccacagggccctatgggaggacagagaccagtctctgaaccgagctgtgggagagcgtgaatgcagggttgttcctgctttggaccgtggacaataaataaactcctattgtgcctagaaaccgcctcagtgttggggtgtgtttgctgcagcagctagtgccaccctaacgactgcagtctaatcattgtgtgtggcagtacacacaggacctgaagcaaccaggagcttgagcgcagggaagtaaagctcattatcacctcagcaacaggggccctgggagaaccaaaggcctgctcctctctgccgctggctgtttctgctagtctgagccagaggctctatcctgctgtaatgtcagtttaaaaggcagcctttccagactcttgtcacatcaccaggagctcttggtcctctaattaagtagtaatgtgcttgtccaataagtgccatatggttgcaatgaatcaaacccaaattatcttagctctaaaaattaatattactaattatgataatctcacaattttatgtctgcttttcttctgaagagctcaaaatgcaagtattaaaataatatgtccaaatatcctacattaggaagaaaggaggacccacggagaagttgggaagatggcatccaacgttaagataaggctcccgtctttctcttgtctttatctctgacttcataaagatagctagtctttcctggcaataagccagaatagtgataggattagggaaacgggattatcttaacgtcacagaaaggagatgaggcacaaataagggaatgaagctaattagatactgcaaaatgccaagattggagaaaactggaatagacttaccctgatggaccttgtctgtggagaacggatatagggtgggtccagggagactggccagccttggctggggcctcatgggaccagaagtggcagtggacagcagagttggtgaggagctgggagggggattcaccaggaaggactgagttctgaatggcagggacgtttgcagacaggagactggcgtctgtccaggagagagcagggcttactgtgagcgagggaagcagtgggatgagtgtgtccggcggtgtctcttacttaagagtgacaaaggaagagtgcaggagtttccgtgtttggccctaacccaggtccacttcactgccctgagagatgtagtgggatgatggaggggactgggggcagagtggatatttaagtctgaggggagaagttaggaaagggttgtgggtcacagaattagagagttaccaaggaaactgcagagaccattacttagtcagttctccatttccaggaaggtttgtcaccataggaaagaaattcattaaccttttattcaacgggtattaattggctatcatgtgcttttcttaccccacaagagcttatgatggaaggtgatcatacaatttatcatccaaattgggatacatttgagaaggaaaggcggcagattatgtgggaacaaagactggcccatgccagctgggacatgtggtcaccttacttatgatctatgagatgtataatcaccccatttgttgataccaggtgcagtgagatgcatgctctatgtgcagtgtgtgttttcaccctgtatccccatcttctgctgggagcgggactccctttctccccgcctgagcctgttctcctcagtagcaggatccagctcaagccctacccccacctgctccaccacaactgccccactgccaccaccactaggcttgctccttaacctttctgtgcctcagttccctgatcagtaaaacggggctaactatagtacctactactagaactgtgcctgactcaaagtaggcaccagatgtgtcctgctatgatgatggggagccctgtgatttggtaacttccccaatctctctgcacttttgtttcctcatgtgggaatcagggacaatattacctaccttttaagggcctggaatttaagaaaaattagcccccttcccccttagaatcagcagcagacatcaaagggcgagttttaatacttcccacacaagttcacagatttattacataatatgtttagttgtggttaaagaacatctaaggggcgaaggagctgcccaaggggaaggaggcagacgagagggacatgtgtggctttgcatggaaaagggaagtggtatcccagataaatggtggccagccttcgagggctctcaggcaagagagaaaactctagacatcaccagtgcctgggctttgttgcaggcagaggtgctttctctagaagggaaagcaagtccctatagtcataaaatgagcagctcttcagctgctagtacttgacctccaaccagaattgatggggtgctcagaactattctaggtactttgaatttttttaacctcattaagttcatctataagacaggtagtttttatattttaaaatgattttataacagaaaatttcaaatgtaatcaaagagacatagataatgagttcccgtgctccagcttcaacagttataaacagttgctgatttggttttatctatttccctcaagatttttttttcttttctgggatgtttggaagcaaattccagcaattatataatttcacctgtaagtacagtttacccttgaacaacatgggggttagagatgctgacccttggatggtcaaaaatctgcacataaattttgactcccgcaaagcctaactactaacaatctactgtttacctgaagcctgactgataacataaacagtcgatgaacacatattttgtatgttgtatgtattatttagtgtattcttacaataaagtaggctagagaaaagcaaatgtcattaagaaaatcctaaggaaggtaaaatatatttactattcattaagtggaagtgaaccattgtaaaggtcttcatcctccttgtcttcacattgagcagactgaggaagagaagtaggaagaggaggaggaggagggcggctaggtcttgccatctcgggtggcagaggcagaagaaaatccacatgtaagtgacccacgctgttcaaacctgtgttgttcaaggtcagctgtactttggcatgcatctctaacagacaagatttaaaaaaatatatatcaccaaatgcctctatcactccagacaacaataacagtaaaacgcaagagatccttaacatcatctaatattcagttcatatgtaaatttcccttattatgtcgaaatatctttgccggttggtttgaatcaggattctaataaagtctacacattacatttgcttgtaggtttgtaaatctctttttatctatgattgttccccctcccattttgcatgtcatttgtttgttgaagaaactaggtcagttgtcctgcagaatgtccctcattttgatttggttggctgcttccttattgtcccttaatttattccttcatcctccatgttttctgtgacctcggagttagattcaggttccgtttgttttgaagggagggtcaaggatgtgccagctgtggttatgccccttcctgttgtgacactgagatgggtgggtgggctccgggattggcagcctcatccttcatctattactgaggccccatcagcctttcccctgatggttttcacatccattgacgattgttgcccagatccattatttcattagggcttgaaatgctcattttctgattctgtcattccttttgcgttgagtagctggaattcttctataaagaagaacgctctctcatcaacagtttggttaccctgaaataccatgtggcagaaaaagcaggacaggtgctttctcatcacttaccggctttcaaagtaatgagttggtcccttgcaaaggaggataggtctttaattaattgattaaacaagtatttattgagttcctgctatatgctgggtatcgttctaacatcctgatggttcagcagtgaacaaaacagataaaaatccctgcattcttggaatttacattccaatgggggaagatggatagtgaacaaattggtgtgctatatatttagttcagggatgatacaggctatggaggaaagcaaagcaggacagggacatgaggatgctagaggggtgggatgctagaggatgctaggaatttgggtttgcaatcttgaatagggtaagcaggctcaggaggtgacatttaagcaaactcttgagaaggtgagaaattgctggagaggagcaggccaggcagaaggctggagtgcgtgaggtagggatgctggtgtggagcccgtgtggggaagatggtaggagacgggcctagagaggtggttgcaggggcagaccaggcagagtcttagaaaccattttcagggccttggttttcccctggatgagatgggcagccctggaggactgtaagcagaggtatagtctgactcacgtttttaaagggtcctgctggccgcttggggagaagatggagaagtcaagtaagggtagaactgagtttaggcttgaaagcagagagccttcagccctggtcaagcttccttccatgtcagctagggcctattgggggggttggagctggggggcagcaagtgcttcacctgttcctaggggttctctgtgcatgtggcattacaggaaatgcttccaactcaatcccgtcctttaaaattcctaggcatagcattctcgagcgcttcaggacataaaatcccggagcagaaaccttcctccccgagtctctaaacaatggctacatgtccatcaccccagagaactggaattccattttatactgaaagtgggatacacgaggacaatgctatcacttgacccatcttctttcatggttggtggtgagtcttttggaccgtctttaccatcactgaagaattggcattggctagcaaggcacattcagggggaacttctcatgattccagaactcagcatttgtggtgggatcggccatcagtctacggagggtgacccctccacccatggccaggtcggcttaatcaataggtgtctgatggcataaggtgcagagcaacagggcaccttttcctttccatccagattttcccagccagcttggagagcactttttacccaggctgccttcccaacacccagagagcccttctgtggatgagcatctctccttgcctgtaactctctcctatcaaaggctgctcgtgaatttctgggtgcttagcaaccaggagaggggacgatacaagccgcctctatccctgtcaggtagctgctcccgttgttcgtcttctcctctgggtttgtatatgcagtgaaagtagccagagagacactccacctcaacttaaacagcaacttcctaaataaataaaaaatacacagaatccagttcaagcagatcttgcctcaaagacagcttgaaagcatcccttctcattattccctgcctgatttccagtgtttctctccctttctttctttctctttcttttcttgtctttccctccctccctctctctttcttccttcctctcctctcccttccctttccttccttccctttccttccctccctccctccctccctccctcccttccttccttccttccttccttccttccttccttccttctctctctctttctttctttctttctttttctttcttctcgctctgttgcccaggctggagtgcagtggcacgatcttggctcactgcaacctgcgcctcctgggttcaagtgattctcctgcctctgcctcccaagtagctgggattataggcttctgccaccacaccagcctaatttttgcatttttagtagagatgggattttgccatgttggccaggcaggtcttgaactcctgacctcgggtgatccatccgcctctgcctcccaaagtgctggaattacaggcatgagccactgcccgtggctgatttccagtgtttctatgtaaccctctgagattcccacaagcctagcatgaagatgagacacaccaagggaggtgaggagctaggagaagggcaggcatctccaaattgcaagtttcttctcaaactgcagatctgcagagaaaaggaaggacacagtgaaggaagcagattctccaaggaagggatatcaggacttaggaatggactctttgcctcttattaaaaggaaagttgcttgctggggaagtagcagattatttcaaatgggtatccgtccttggtagccaccaatatccatcagtttaacaggagaggaaatagagttgtcatgccaggaggattttggaggagccagcggctggctatcgagaagggaagggagctagcacttgctgagtttcttcaaggggccatgcactaactgtaggaagcatggactttgctttttgcatgggatgaacctaactcagagttgatgctgcatgtaggattatgtttttccgacaatccagggatctgcagaaggcttgctacaggatctgagcaggagtctaagcagttgtcttgtggtatcaatgctcctgtgtctggagagctggtcgctaagacctggagtctgggccccttgtgggggtgtcacagaaggctgtgaacacctctctgctcctggaaaatgccttcctttcctggccccaggacagactctccgacttccttcatgaccgggttcccactcgggagcctttggaaccgcttgagtaccagattattaacaggacccgtgattgtgatttcttcccccgtacaaattcacagaccctgagaagaaaaggagaagataggctgggcacagtggctcttgcttttaatctcagcactttgggaggccgaggcgggcagatcacccgaggtcaggagttcaagaccagcctggccaacatgacaaaaccctgtctgtactaaaaatacaaaaattagctagttgaggtgacaggcgcttgcagtcccagttacccaggaggctaaggcaggagaatcgcttgaacccagaaggtaaaggttgcagtgagccgtgattgcaccactgcactgcagcctggttgacagagcaagactctgtctcaaaataaataaataaataaataatttaaaagaggagatagatgtgatggcggtcttttctgtacttagaacaacctaatagttatttaatggataaacaggcattaaaatgaatgtttgatgacttggaatccagtcttttataaaactctcagtgttctgtgattccaggcactcatggctgtggcaggcatcctgccaggtggagctgggagttcagcacagaagtaagtcggggaggaggtatgcattgccacagacttaggaagtgttccctggacctgctgatgataggttggtcttagccatgttcctgaacaagtaagttgtctaatgaaaggaaaacataccaacctgttagtggagttagcaccctagacccatagactctaaggttggaaggacttttgaagtcatctagccccttgccccactcgatgcgtgattaatacgcaccacagaaactccgggctctgaatactgaacattgacccagacccctattgcgttagaaaatattattgcaattagtggaatgctgctagaatattggctccagacctgagtctcaaagttggaagagatttagaaagaaggatgtccagaggaaggaacagacatgagtgaagttggaaaatggagactggcaaagagtagctcgaaaaagaacaaagtttcctaataatgaccacaaatgagtatttggctgttcaatggatatatgcttgctccacgctcattggatgctagcctgctctcaggaagagctcttgccttcctgcctccaaaccactgtacacaccgttgctagattgatctcccaagaatcagcttctaccatgctctttctctgcttcaaatgaaattttgatcatttctcttcatctgacaggtgaaaatcaaaattttctgagcttggtcctcaaggcccttccttctccactcatcctttggccaggcaggccctccaactgcctcctgagcagcctcactcaggtctttgctcatacttgctagaatggagagcacgtcttctcgttccctgtaaccccaacagtgtctgttgtaaggttgagcacacggtagatggatggatgaagccttcattctgagtaaacacgcatgcaagtataaacacatacctacacacagaaacaccacacactcttaagtgtagatgaagagaaagaaccctttctttcttccctggtgtctggcaaaggccaaaggggtggtggggaaagcattaggatacagaggctctggttcttgttcctccctggaactggcttctgctaggaagcccagcagggcctgagtgctggcaagcctggcatggagccctcctgctttggaggaagcgaaatgtcccagcaggatgagtcagtgggagaatggaaccagaaagtgagtcattttgggagcagaggctaaaggatcttctctgctcaaagatattttaggtcttggtaggttttccccacttctcttgtttagatataagtttggggcatgtgactacagtggctcagttcccagatgtaatgctgagagactgtccagtgcgctgcgttctagaacatttttgctgatagggaggccgtaaagtgaggggctggttttggagccaggcagattgggttctaatcacagcgtgtcccagaatcagctggggacctagagtgagttgtttaatctcttaaagtatagtttttatcattttcaaaatgagggttgttggaaatgtcaaatggttgttcagcaagtgtttgttgagtccctagtgtgtgtctggcacagagctgagtgcagagtatggggtgctgaatactgcagccacgcatcctgccctctggggacgggtgcagcttgggattgtgttatatttgtagcagttctgatgacaacaagaataaaataaaacacctggatttgtttcatgaacataaccctcaaatctgcactcccctattacgtgtttgggcaactgagttttggaacctacatatcagactcaaatgttttcttctggggggttacagtctggggaagacccctgtgtaaagcatgtagcatagtgcctgtggacaggagagcccagtccgtgacggcggtaacaatgatcattactacctctgttatttcctgtagccaactgacatctttgcacctctgtttcctcatccagaaaatgttcagctgaattgcagtcctttcacagaggcagttcctgagtctctagtcttggggctcatgcttgaagttatttagagaatctctaagatacaagtggagagacagctggaaggggcagcacccaggccttcagtgtggggacagagttaagatcaacatgatcacagcagactgacacggcgagctgaaacaaacaggaaaacatttgagcctgatgttaggttccaaaactcagttgctgaaaggcgtaataggggagcgcagatttgagggtcatgcccatgaaaacaaatccaggtgttttattttattcttgttgccatcagaactgctacaaatatgacacaattccatgctgcacccacagaatagtgagtagtgtgtaggccagggcaagaaaaagaagagcaataatattctagttattgtaggccaggggacccacatccacgatatcgtttttttacagctcattactgaatcctcacaataaccccatggggtagatattactgttattacccttttatagatgagaacactggagcttagcgagggtaagtaatggactgcaaggacactctgtctctggcccagaggaacagctggaggatgcaggcaagatgtgtgttaagggggtcctgcagagtgggggtaaactgattctggattactcattaatgtagaactccgaccagtgggtggagggtatgggttcaatagggagctcttcagaaatggaacatgttgagaggccaggagttctccatccctgaaagcattcaaggagaggttgggtggctgtgggaggtattggagaagggattttaacatcgggagggaactggggagattgtgtgtgagtttctgtctgcaaaaaaaaaaaaaaaaaaaaaaaatgacggtaccaaccttgaacccatgtaatcttcttcagtaatattcaagcaagaacagccaccataaaattgtgtgagcaaatcaggtaatactggtgaaagccaaacacaggctccccgttgtgtgagtgagaacatgacattgttacagtgatgggttcatgcaccctggggtgggtatgctgatggtttcttctgcttctgcttctacgaggcccctctcccaatgcctttcccaaatctctccttatggggtttttttccccctcctaaaccaccttaaatcgaaatccactcacatttgtagccatttcacagtctctttgcatattggtgagccctgtcgggggtcgctggtatcttatagtattgatgttacaaaatgtaaagttactttggggaaatgacttctcttctgaagcttttatagggagaaggtggtgagcttacccctacactctctcctttcctttgtctaattcctccacagaacatttgtccggtgctcactgtggactggaagtgtgctagggactgtgtactgcaaggtgactgggatgtgcgcctgagcatccctgagtccaaggtaggggaaagaggaagtggtccacgatgacactgtgatgacggccatcctgatgaaggcacaccccaccctgcagcggctcagggaaggggcgcgtgtgcagacatcttgcaggcagggtttagatggtgctgtcctcggaagagaggactttggaagaaggtggtcttggtttcggtccttagtccaccggatgccaggtaatccttaacctttctgagcctctgttcttcacctcttaaatggggatatcacttcccccagatgatcttttattttgtttttaaaaaattattatttttagtatttttaatagaaatggggtctcactatgttgaccaggcttgtctccgactcctggcctcaaacaatcctcccatctcggcctcccaaagtgctgagattataggcgtgagccaccatgcccagccccctgacgtgatttctatgaaaatgaaattaaatgagttaatttagggaagccacttaacataattcctggctcaaaaaaaaaaagaaaaaagaaagttttcttcccttcctgaccttgtaggagaacagagctccttcgcctgaggggcatgagtccctatgcagaggttccctaacacctgctcataggtctgtgtcccgctgatctggtaagcaccgggaatggtctcttaaacacaaagtttgggctgccttctctagagattctatttccacaagtgtgggaaggggctgcacgggaatcagaaatgtttccccagtgattctgatgcatagttcagtttgaagacgtgctaacaatatataccaacaaaagttgtctgcgtctttttctggggacagacccccccccggctttcatcagaatgtcacggtcccacacaaatgaagatgcatcctctcatggtatgtgctagcgggcacagagagtggggctggagaatgagggcttggtaggcgaaaggccccagggccagccctgctctgccctcgtctcttgccttcccgccaggtgggtcaggaaataggaacaggtggttagtcacggggctctccagcaggtagggcagtggctgaggaaatagcggtatctcatcagctctgtctctagaggttcttaagatacttagttgtcaccagcctgaaaagtcagcgtggaaaatgttccagcctggttcctgtaaacgtaaaatctgttatgaattatatccatccacgtggaagagggagacagagtgatctggtatgtgcaggagagggccagcctctgcctggtctgaaagcttttgcaattgttcctaattggcccagtctttttctgcaggaatctcctctcttttctccatcccatcccccactgcctgcagcttctgatttcttggcaaggcaagcaggcaccagagctggggctgcggttgttctgaaggattttcaggtgtgcgtgttgaaagccggcaggaagagaatgctggctctgtgtttagcagccgaagggacttgttatttaatgtgtcttctgaagccacgaggcctcggctttgtaacttgctttctttattcttataaatcttctaggatgctccatggactgtaggaggagctctgacttcccgaccatacccttgtgtttaccactacagggacagaggttcacagctgcttctggttgctgtagatgatctggttccctgataatttgagataagtttgtgttagtttggagtcttcggtgaatacgttagggtacatgtttcttcgtcgttcctggcagggctgatcatagaccacatcaacccaagaatgtgtttgcctctctgatgaggctacatctagaatatgaacttgtcgagtgcttaagtatctttctacatagtttattcattagcctgttcatttatctgttcaacaactatttcttgcttgtcaaccatgttctaggcatgtcatgggctctggaagcagagtgagaagcaaggctaagtcctgggctcacggaacttaggttctaatgaggaagacaggcaaacaaggcgccgtggagaggcaggcagagaaccttgctttccaaccctgctcagaggtgcagtctctttatatatcccacttccgctatccccaaacatgcccattagcactgacatctaaagggctcatggtgaattaaaatgtgaccccacctctgggtatttagtcatttagtattgaactggggttaaagtcctaaggaaaggcatgtggagctaatatttttggggggacaggccctactggcagccatggaatcttactccgcgtggctcattgctcctgggctttacaactcaacgcagctgtagttcattcaccatgctgtggccaagcagcaggagttcaaatgtccccactgccatctccaagttgtctctctcgggttcctatttccctggcttttgtcactcccacctcacctgtggcccacattcttctctatttgaatgtgtggcaggcaggcgagatagacaatggggaggagttgttctgcaggagagaaggggacagtccttcctccagcctggagcacttcctgcaccgctccccaccccgtctactctccatatcccaccacgccctcagggccttgccctaaccccggaagcccacctgtctcttggctgaaatcctatgggctgagttgggtccccccaaaactcatgtgttgaagccctgtctcctgtacttctagaatgtgactgcatttggagacagggtctttaaagaggtgattaagttagcatgagaccattagggtgggcctactccaatatgattggatttataaaaagaagaaacttggacacagacacacatggacacagacacacatagaaggaaaagcatgtgaagacatggggagaagaggggcaactgcaagccatggcgggaggcctcatgagacatccaccctgctggcaccttgatcttggacttccagccttcaggaagttcatttctgttgagtaagctgccctgtctgtggcactttgtcagggcagtcccagcactgcctcctgccctgtctgtgtggccctgggcagaagcggcctgggagtgtcactcacccttcctcctgcaccacgtgtctttgcccggtgggctccagccgcgcctgggcagcagtctagacttcctgcagtctctcaggcttctctgtggctgtcccgtgccgagcgcccaatgcacacttgtagcctgattgattggttttctcagccagggcacggatcgtttcctggccgctctctggctccttttccaggcacctcactcggttccctactctgaggtggctacggccagactcgcctcagcagctgcctccactacgggctgtggtttttggtgagcttctttcagtcctctcatctttatgggaaaactgcccagcccaggaccaattagcgtgggatggttgcaataaaggtctcccttcccgacatgtggccagcacagagccttccctggttccctcccggcatttagtcacagtccccagctgtgtggtcggtcctctcggctcatgttatgggtggccgggaaggcaggctgtcttgggatctaggcccaagtgactaggtccattgtgggtgaggcaaggtggccacctctgcatcctcctaggggtgtcctgaagcggctgcgggccatgggcaggtggccgctgagggggtaagggttcctttcagtgtgaaatgtgcctgtacccaagagaacttgccttcacttttttttattttaaagaaatgaagggagaaatagagactaaaaaccctgggggtcagggtctgtgagacaaactgagatgtgctggagacattgcttatggatttattgatccctgacttgttcataccatgtgcctggaattcagcacttacacgtttccatagcacaatggacatcagtttaatcataatgggatttcttaagtgattactatatgccaggtactatgctaagtcagttatcaacacgacctcctttaatcctttcgacaatccgatggggaagctctcattagccccacttgccagaagaggaaactgaggctcagagtaggttacatgactaaaagagcaggggctctgcattcaggtctgcctgacccagagtgtattatcttaaacatatgtgacacttcttgcttgccttcctggtgctgcaccatctgtttttccctgtgaggtcccctttccccacaaactggctgtgagcacacccgacccctttcctgtcctgctgcccccttgcctgtcctgctgcccccatccctcggtgctcagcttgttgccagcagagtcaaacacacagactcatggtaaaacgttatcttacatttgtgtaccttttcatgttttcagaaccttttccaggcagtatctaatttaatttttaccatcattctgtgagtgaatattttctgtcttatggttggggaaactgaggtcagagaggttaaatgattgcctggggtggcactgcctagcctctgtgtggtggagctaggacccagtcgaggctcggagttctaatccaccagtctaccctggtaggaacctctgtgcaaagccagcccccatagcagcctctctgtcttgggccaaagatacaaatcagcaacggccaggaaatgatttgcatgaggaactgaggtggggcggtgggcaggagagaggctgaggcagcaagggacagagtgggcacacagaaacttccctctggaggcctcagcctcttcccaaggctgagcatctgcgcagggcttagtttgttcattcctgggagctccaggtaagtctccctctcagagggaaaagctgattcttccaggcaagggtgaagagacccacctttctgagtcagtgaccgacaggccagagggctgaagatgtgggcactgcggtgagaaccggagtagccaaggaagcagggtggtccccacaggggcggcgattggtttgtggggtccctgcctgtcctccggagaaagattactaaggagcaaaagccgactttgctcggtgacccctcctggtgccacatccctcatgcctgcagcagaaggtggggggctccaggcccctgacaggtcatcctgatctcagagaagagtctgctgcccccaggacggggactgagctgagggcgaggaggatgccaggagaggcaccttggcccctgctgtggtattggccacaggttgggagctgcctttccccgaagccctagctttgcttctgtgagaagcagacacccagcagcataagcagcctgcctaggaggcttttcactaggaattaaaaacaccaaaaaggaacttcttatcagcaggtaccctaggggccacatggactggtaagtggtatcttccccatggtctcttaaggcctctgaagtcccagaccctcagatagttggcaactctgcctttccgcatatcaaacatctgaaaatgcatctacctcgcacatcaaatagaatatatttgctataacacaattgggaagaatggttgtattttttataatgttgagttttattaagaataaattattcattttagtcttgcaacataaactcttattctgatagataactatggatcgagatgcatttgactagttggcacaatgttaatttttgtagatgttgtgtgaaatatttattttgattttctagttttatattttggacccaatctagttttgtttctgattttcacattttttttcaggacagtgaaaaagcttataggatataagagttgaacctattgcacctaatggataaaatctcttctgtctctccccatccccagagagagagaaaaaataaaaataaaaagagaaagacactgtttcagcaaattgatattcggtttttaggcctatattatacttgggtctcaggtcctctaatctcctatttggtggtatccttataaaatacaagaagtgttctctgagaaatgtggaaaatttctgacgatcccagatgatactaaatcagttgccccaaatcctttagaagaaggaagaataaggccaggcacggtgtctcacgcctgtaatcccagccctttgggaggccgaggcaggcggatcacgaggtcaggagatcaagaccatcctggctaatatggtgaaaccccgtctctactaaaaatacaaaaaaattagccggccgtggtggcgggtgcctgtagtcccagctacttgggaggctgaggcaggagaatggtgtgaacccaggaggcggagcttgcagtgagctgagatcacaccactacactccagcctgcgcgacagaacgagactccgtctcaaaaaaaaaaaaaaaaaaaaaaaaaagacacattcccaacgtgaagcatcaaacagctcagcttttctaagtgttgggagaagtggagaacactggttctcctgggatggtgcctgggttagcaccattgtgtggatctggtgtaacctgatacaggatttctccccttgcccagtaagagagccttgtgctagatggatgcagcgaggacagaggtcccttgctggctgtgtgtgcaaatattgagcaccaaatggctaccagaggaatggggaagaactgactcgggataagagtgggatgcgtacaaggagagaaggctggagaaaaccttgcacgctgcgggagcaggctccccaggacgtgtcagaagggcccagtccatggaaacagggagacttgccatatgggccatcgtggctgcctgtgtggggactgaagctgggcgctggctgctgcgcgagatgagggggccaggtccagcttccaaagggcagcttccaggcagagggctgctaactggctggaaaactatcagcgtgtggagtggaaacctgtaggggcagggaaaccaaggaacatttggccatcttccgccattgtgatttacctgccataagagaagctaaagtaaaacagcatgaagttgtggccagccccattaaaataacgtgctcattaagggctcttacaactagtgatatttaaagaagaaagaaaaaaactcacaaaagtacttgaggcaattatctacagcaaaagaagatgcagatcccttgagatcactgacgcaagagaacaaaggaggtcccaaaagaggctgcctgtgatccaggtgagagccgaaaccttcaaggctgggtaccagtgcttcttacacctgagtgaagcatcttgggacatgccttgtggttcaacgttaaaggaatagcacagccaaccagaacctgctctttgttaatggaatggaatcctctttctgcactaaaaatgagatgatgtgaaatcctttaaaatttattggaaggagggagggctttttgtgcatgatgcgttaccaggaaatgacactgtctctctccttattgcctaattagcaatgttgtacttctgtgtgaaatggcgtgtttaaacattgccaatcgatttaaacaaaagatttcaaaatactgtaggatggagcacagtgaaaaattccttgccagccagcgttctcccaggtaaggtttttgtcattcaaggtgtggctgcacagcagggaaggctttgctcatccccgccccgcagtgccccattccctccatcagccgtttatctagcattgggtctggttttctgttttttgttgtttgtttgttttaattttttcagggtatcgtagacgtgttgggttccactaggccctgccagccattcacttatttattcattacgcactcaatgaagacataagctgtgcattctaggtgcaaaggacgtagaaatgagtataatacagttcctttcctcaaggaggtcaatccagtgggaaaacaggtgtgtttgtggaaaatggaaatacagccggcaggcgaggaggctgtagagagaggagcacagtgctctgagtagcctgtctgctgtagcaagtcacccccagcagctggtggcttcacagagtaaaggttagtttcttgttcacatcacagcccagcttggattggtggggtggcaagaagggttattcagggtctcagaatacttctgccgacaggctgtgccatcctctcaggccttggaacccgcccccttttaaacccctgagtctggctgacagataagggcccaagtcgcacccatgttttagggtctaggcctagaaagggtgccagtcatttcctgcaagtcccattggctgggactcagcctgtggccctgccttgtccagggatactgggaagtgtggtccagtgccgtgcccaggaggaagagcaggtgtggtgcacgtcagccatgtccccactccacggagcagcccgttcaccctggggcgtcaggagaggctctgtcagaggggattttgccagggagatgtggggtgtggggtgctggatgtggggtccaggagagcaggggcatgagaagagcagcaacccaagcaaggaagaggaaaaggcctggatgtgtcttcagatagagacagactgaagcgccggcccacactcaccagcagcgtggctctgggcttggtccttaggtgtcccaggtgtctgtctccgcacatcttcccaggccttctccagcgtaccggcatcacctggggactggccctctgcagtcacgctggctccaggctcaccgggagtcacgttctctggctgtgactttccttttgctgtggattaacccagacatgggcctgatgctttttctttaatgtatacacacacatacactcacacatacacacatggacacattcactcacatgcactcacatgtactcaagcatacacacatgcactcacacacatgcgctcaggcacacatgcactcacaggcacacatgtaaacaggcacacacacgcacatgtactcatacaggcacacacgtacacccaggcacatgcacacatggtctcatacaggcacacacgtacacacaggcacacacatgcactcacacacaggcacacctccacaggcacatacatgcacatgatctcacgtacacaggcacacgtatgcacacacacatacacaggcacacacatgcactcacacatgtactcgcatacacaggcgcacacgtacacacaggcacacacatgcacacatggtctcacacaggcacacacctacacatggacactcatacacgcacacatgtactcacaggcacacgtgtacacgcacgcacacatgtattcacacacatacgttcacacatatacacgcactcacacatacaggcacacacatacacactcaggcacagacacacacacacacatgcacgcacatgggcgcgcacacacacaccccctccctccctctcacggtttttggttcagcctgcactcaagtttttgggaagatggagctgacatcacagtaatgtgaatgttgaatatctgaaacttctgtgctgagaaatcccctcaggcctttttgccaggttggctgctgtgtcttcctatatttcttgccctttccacctctcccactttgctgctcccaaacaactcttaacacccaccgccccctgtttttgttatacagagcagttcagccctctccagtccccacccctgagctcagctccaagccttcttctgcgcgtggattcccgtgcctgcggactcacagcaggccgggccggctcacgtgggatggaccctgtctccttccacagggagaggggcagtaaagacgtccatttcccatgctttgaaggatgtcactgtctcagaaggcagaagctaattgtgtcggttttaagtactttttccttttatgtttaatttcattaaagttaattttcccttatgtgaaatgtgaatgctgccatcacaactggaaagttgtcgtgagaattaaagatgataatgtatgaaagtgtgtaacacggtacctggcactccccccactctccccctcctccacacggtacctggcactccccccactctccccctcctccacagagccctggaagacttggcggtgctgtgatacgtgtagtgtgtgatggggagcggtgagggacagctggagagggtgcgctgagccagagtttcatgctgtgtgtttttccgaggaggtgggcctttgtcctctgcattcagagtcagaagagagttcatcaggtacaaatgggaagagaaccttttaaacagctgtctgtttgagcagatttccccacctcggattcaagatgtcattccatgtaggtttgcatttgcagggtacacccaggagaagctgttagttgctgtgattccacacctggagtgaggggagaacatcatggtttcctgccaggtgtgctggggcttactggccctgccaggaacatctggttgaaacttgtcacgtcaaggccgggtgcagaggcccatgcctgaaattccagcactttgggaggctgaggcgggtggatcacttgaacccaggagtttgagatcagcctgggaaacatggcgaaaccctgtctctacaaaaagtacaaaaattagccagacctggtggcacatacctgtcatcccagctacttgggaggctgaggtgagaggatggcttgagcccaggaggcagaggtggcagtgagctgagattgcaccattgaactccagcctgggcaatcgagctagaccctgtctcaaaaaaaaacaaaaaacaaaaaacttgtaaaggttccatgcactccttccctgtagaggctggtgttgagagctcgccacctttccttctgtttagaggtaggaagagaactcaggcaagcgatgagcaagccgtctgaattgagcaagggccttgggttggaacccttctctcccctgctttcctggtatcacagtgctagactgggcctctgcagcccacccagccgaggaggcccttctcctacagcagccttgacaggtctgtctggcctctgccctgacacctccagggctggccatctatgtggggaagattatgattggaaggaaggtttttcttagagctgccagtctttattttctacctgctgctcttcattttgtcctcagaggaggaacgtgtcctctcttccctaggacgtctgtcttggtattgaagacagtgcttctgtgcttcttacttatcttccttgaggttagccatccttgtctctgcaccctctccctcagtcctggccactcccatgtgaacctcagtgtttattcctgacccaggatacctcagctccaactggaccccaggcagtaagaggcttcctcttagagtcagcggattcccactgatgcagcccaagattacctgccccgtcctcctcctcctgctcctcctctggctcctcccactctccctcctcctcctagtgcttctcctcctgttcctctcctcttcttcccctcctgctcccccctgtgttcctcctcctccttctactccttttgttcctcctccactgcctcctcctcctcctcctcctcctcctgctcctatccctcctcctcctacacctcctctgcctcctcccgttcctcctcctctgtgctcttcctccctctcctcctcctccctgctcttccccttccccttcctgctccccctcctcttcctgattgtcccctcttccccctcctctgagcagccatattacatagcttactcacgttgaccttgtgctgctggtgagctttgtttctccctttctgttcatgtactgttctttctcttggatattttctgccaaatgtttttcattgatgactttgctcttgggtctccttgcctatcttccttccttcccccttcctgctctgtgacattcttgtttacataccctctccactgtgagcctggtatttcagtgactggagaagttttgggccttatctgagctgctttccttgttatcacttatgttccagcagctcgatccatcttcccatgcaggaacgtttctccccaaagtcctgaccctgccgtggagcacctgaggggaggagtcactgggtttctggcctcagaggagcacagtgttccccaggacttaccctgcatccgtattggaatatctgaaaatttcatcactgttgaaaataggaatgttttctgatctaaggtcttctgaggacattggggacactttattcccaagagcaaacactgactaggatgtctttttggctatgatgggatctggtagaaagtttcaagctactaaaatagggaatgtattctaatgttgtcttgaaaatgaatcaaatacacttccctgaatgaaagaagagatgtgtgtgtgtgtgtatttaaatcaccgatagcagcagtgatgatggtgacagtcacccatgccgtgcctggcaccttgctaagtgcctgcacacattgtcagttggtccaggcggtaagtcatgaggagtgggttttagtgtcccaaagcctcagggaggttaaggcatgtcctgatcacagctggaggacctcaccacgcccctccctgtggaaggagggattcttccgcaggaaatggagttttcccacagaacacaggacaggcagggaggaactcactggggctcatggctgtgctactgctactaccactgggcaaatctctgggcctcagtttctcctgtagtaaagtggcaggattgaattggatgcacttaagtaggtttccagctctaaagatctatgatttgttgtttcccttatttcagtgacaagttcctttggaaaacattgctgtcacaagaaaaaatgccatcatcaaaatgtcttctgatgttggacaaactgaatgggggttaggaaaccacttctgtaggaagcaggggtagggatgaaggcaaggaggacagatggatgagcatcctaaacagaatagggaaataattttagaactgatttttcagggagtcgcaagattatattactctagctctcgctctgcacctggaattcgacagtgcttaggatagggaatgtcgaaaccgggaaggggcttcccctcagccccaaactcagaattcgtatgtcagatctggaaagggaccacagtgaccacttagtccactccttcattttatgtcagcatccctggagatcccagcctttgggagaaaaagactcctgaggccacgtggtccgagctcctggagcatcgctggcagaggagtgttcagatcagatggtccccagcctgtgcaccaagtgtaccatccctgctaagtagatcttagtggagcagggcttacttcagggatgtggagcttattgggatccttcagcctctcttccaataacttctgctttagagattatgatgtaactgatgagaactgtcttgagacttccttttgtacttaaagtggatggggcaggctggtttagggcagtgtacctggggcaaggagtctggggtccttctgttggtttaggaagctcctcttgtctgtctggcctggatacttgtgatttgccagcttagtctaacagttaaccacctcttagtgggaagtaatgaatccaggattctctgctacgctcaggtgataaattgtgataaagtcaagtcagaatttcccagcttaggtgttgtgaaagcccaaatgaggcctgataagatattttgagtttttcacacagaagtaatttatagatgattcccaacttttgaactgctcttttatttattattaagttggtgtttcaaacttagaaaactgcaaatggcatttagttttccaggctggcctgtttagtgcataacacagctgacacactatatggttgccataaatcataatggaaagtagtatttttgcaaatggataatgtagaattgcagttgcagactccctgaaggccttcagtggttccagccagcacatgaacacatttacactgaagcgtaaaagacggttgctttatgcatctttactctgctgtgagggccatgaggagcaagaggtcactgggtgtctgcaggcagtcccagggaagcagcgaccagagcagcagggtttagccttcttatggtcatgggtgtgtgcagccacacgacctcctgaaaaactgctcctgggctcttcagaactgccccagaccaagggtccagagttgttaggagccaggggggctggggaaagcgaagcctctagggcttctcagattttgaggaggacagaacctgttagccacctgccttttgctcagaaaaggtgggctggagctgcccagcaaagtaaatgcaatgcctacctccagagcctggctttccacgaggtacaggctggccctgaacacctgcctccttccaggtgctgtgctgtgcttttgagatcaggagtggaagctggcagaaccaagagaatgcaacacactggcctccaccttggcccagaacatacccaccacgccctcgggaagtttaaatcccatcactctctctgctgcttttccctgttacagtgtgtaaactgagattccacacttggaaatgcatgtgttcctctctgggaagacctccttgctgcccccatccccctgcatcttgtgtccactggatcctctcattgactgttgacaatgctcagtttaatgccaggcagcgtacattcagactgtaccccaggaaatctgacacaaactgtgtttcccattgattttaaaaattaagactcagtgatataatgtcacttattattatgtaataaagccctattatggctagtaatttttcagtgactagctgaattttacttattagtgttcatttaagtcagcctgtaatatgttcagtgcaagtactaaaactgcctttcttcaaaaatcagaaatttgacattttttaatcagtcaggacttccttcctttcccctcctccaaaaacatccagagaagtgagattttctcacatttaagtcaatgattgaatagaaccaaattgggggaagattaatttttgaaccagtaacaccaaactgaaattaattttactaatttcaaaatctgacagttttgaggaccctttaatagaaccagagcttctgaaaataagcacctactgatgggttcagtgcagaaatgaacccaggtctagaactgcagtgttaagagatgatttccaaacgaagctgtggtttcatttggaacgctttcttgatttacatgttctgggttttgtaagtttaattcaaatttattttctcctaaatgcatttttactaccggaaggcccccgtatggaaatcaccttctctcattatgcagcttgcctggcccagagggtgagcgggccttggaatgaggacacccgccctggctgggagtcgaggccgagtttgcatccaaagctgtagcacagtgcggcccacagcaaagggcatcctcaggaagcaaggtgcttgtgtttgtgccttcgtcctttaagacaatacccagatctggcagcatcttctgcagcaagcaggagctgattacctggagctctgcctgcctctctccccgcctctgcctccccccggagaggcggcttctgaggaggctgctgttggcggccaggagaattccttgtctctgtggaaccggaggcctcccctctgcggctatttaaatgtgttcctccggcatgaggatgactcaccgtttaacaattaattacagctccgcatattgtaggcactgcacctatatgggggtgtaatctccgtgcggcaccatgttgatgagctgcttctccacatcaccaaattgtgaggacttcgattttaaaaaacagaaattgaaccaggcttggaggaaaaggcaaatttatacaatgcctttgatatgaattctttttattttcttctctgtggcttgcagtttccaccagggtaaagcaggcagaggtgggaggtggggagggagagacagggggttctggctaggaagggaacgggcaaggaaactgcccactacgtgctgtcacctggtggctgctgtggccggccctcattcccaccacatcagagagaggcataataatcttaggtgattttttttaagttttcaaggtgaggatgcattttactatatgctaatttttcttaatcatatgttatggtttattatcgacagatcttttaagaacttttcctgcagtaaatatttcaaactttataaattaagtattggctgcataaagtcctgttgcctgagatttgttgcaagtttgtcctttttgagatacatcgagtggctccaagtcatttgatcatgatcgtgtccatgatatcttgatagacttttaagcgtgaatccccctgatctctgtcttgctgccttccccacaccatcccctcaactcccctcccagccacgaattatacttcctcactacccaatttcttttggtaccaggagagggccactcttgttctggcctcagggacgttgcacttgctacagctgactcttgaacagtacgggtttgaactgtgtgggtcacttacacgtggatttccttccatctctgccacccctgagatggcaagaccaacccctccccttcctcctcctcagtctactcaatgtgaagacgatgagggtgaaaacctttatgatggtccacttctacttaatgaatagtaaatatattttttctgccttaggattttcttaatatattcttttctctagcttactctactgtaagaatataacataaaatatatataacatatataatatgtgttcatcgactatcctgttggtgagccttctggtcaatagtaggctatgagtagttaagtctctggggagtaagaagttaccttggattttcaactgtaagggagtcagcgcccccagtccccacattgtttaggggcaaactgcattccatcttcttggactgctcttcccacaggtgttgcccccctcccttttcctctgtcaggtcccagagcatgggttaccaccacagagaggcctctgtggatgcctatgtaaagtggcaccatttacttcagccgagaggtgaaggctgccgtgaggcaggaccatatcactgcactcagtctgggcaacagagtgaggccctggctcaaaaataataccaataataaaaaaaagtgctaccatcctcccagctcctcactcccaggaatcactcaggagcccatggttctgtcttattttgttcatcgcacaattactatctgaaatgatctcatttatttacttattttttgtctgcctcccaccagaatgttctctgttctctgccgtatccttagcactgagcagtgcctgcacatggtgagcactcgacaaaaatttattataaggatgaatgaatggatggaccctcgattctgttattattatgttttaatccagacaacactcaggagtttcactgtatcagtatatccattaggaaggttagtaatgtgtaaaaactctcctgtgaatgctttcattcagtactcagtctgtaaggggtaaatccttcagcagactcttgaggagtgtttaccaagtgtcaggcactattctagagcagtggctctaacctagggatgattttgccttccaggggcagctgtcaatgtctaggaacatttttggttgtcagggtgggtggtaggttgctactggcatctagcggatagaggccagggaagccgctaaacatcctgccatgcacaggacagccccacaacaaagaatcatctggcacaaaatgtcaatagtgtcaatagtgtgaggttgagaaaccttgttctggagtctgaggatacggtggtgacagggcaaggctcctactcccatgaagcttatattctgttgcaggaaccgggatagatacacaataaacaaatgagattattctgggaatgacaagggctgacaaagaaagcaaatagaatgttgcgatggtagctgtgggagttacttagatcgacggattggggaaagctttctgagaggtggcatatgagctgggacccctccagatgagctggaggcaaccctggagatctggcagaccctaccaggaggagtcagacagcaagtgctaatggggaaggggaaaactttccaaaggttctgaggtttaggttggtttcaaagagggccattcactctggggcttgaatgtgcttttatccaatgaaggtagcctagacatctgtttgaaaaaccattagattagtattcttttttgcaatatctcgttttttggaaagagctaagcttcctaaaaaacgtatttttctagacttcagagttccttaagagtggtggtttatctttctgaggttggctgccatgttgattcctcctcccctttcccagaattgggagtcttacagctttgtctctccactcagtgctcagagaatcacacacacagtcccaggataggacattccaaaaaataaagaagggcacagagaaggtgggggaccttccccgcaacttagccgcagttggagattcaataattgagcctgaaagatcactttaatttcctcaataatagtttggtgttcttatgtgttaggttataaagccctaaaacgcagtataattcaataccattgtgctacaaacccactaacacttttttcttcactgcccagcctggctcctcctcttaggagtcgcatgtccatacagagtcccagagaaattctacatctttctctgtgttctcccagactgaacagaagactggaaatgtcttcccttaggtctttgctgccaatctgggaaatgtcaaaggaattagcttttctttctatacttctagcatgtatttatcctcgctataaatgtcactttttttactgcttgtgtgtcagtcaggttgcttttggctgcaagtgtcctcatgaccctaacaacaagttactgtgtcacatatcaagttctgggagagggaattccagggggaacaggaaagcgtgtcttccttgagtgaggaaccctctccaagaaccctccagcagactccgccatgcttcattggccaggggctggccagatatctctttagcagggaagatgggattggcttgggtgaattgtgatgtgcctccattgcttggggagaggtgacatccaaacaaaatctgggcactcccagcaagggagaaggagggagtgcttctgggtaggcaacgattccaactttatcatttgtcttcctggcaaggactcagaagatactgaccatttatatttttctggttcttcatcacatgcaagaatgtcttttgttataatgattagagaaatgataatgatcgtgggcctttgtttccccttgcctgagctgggccttcacaatgcacaggcattgcttttgataaattggattgacttagaggattttagacttggaaagccttaaagaacagccagttcagtctttgtctttccacacagggacactgagcccaggctgccatgtggcctgcccaggacctcaccgcttgttcagctgaggcccgcacgctttgggtgcacaggctcttactttgtgtctttttcctaatttcatgaagcctggtccccgtttgcctccagctaatcaatgctattgtacacgtttaggtctttatctcagttgaaacctgcaccagaactggagaactaagtagtagtcatatatagctcagcatgaatattagatatttcttattttaagtcttctcttgaatcatttaaagacatttcaatcacttattaacaggtatggaagttgttttgggggatgaggaccttcagtcctcttcttggtccttcagaaccacatcatctgggtggtgcctcttctgccccttcctcctcgaaggcagctctgccaccactaacagccacagaggagaagaggaaggggacttgcttcacgtgggaaggagtgtctcacctgaagcatccttggacgcttatttaatttaaaaatgtttcatgagcaacttctgagctctgttgtcctcttccccatgagcggagggtggaatgaggcttgaggataaaggaccctgggccttgagaatgcttcaagccccggagatgaagttgtctgtctgacagaggtccccaagtctgcatccaaggagaggacctctcttctctatgaagagatgctttgcttctggaaacccaagtacaatcctagaaacctaggagctggccatttgtacaccgaaagttttctttttttctgtgtgaatggaatccccatcaggatcctattaaagttctctggggaatttagaaaggtcttgatttccatgctgggggtgtagccatgcataccctgtctatagtgaaacgtacatagtattttccatgaagggaagtgcctgcaaactattcaaagtatcaggccacaggagcgaccagccaggactgagaaggtggtgtaggatgggatgtccgcctgcgatccatctccatgctgtcctgtcctcatgtccccataggaacagttatggacattggacttttccttcttacagtccccctcagttgtggtgctgttggcatttttgcagggactgttcgttgttaggggctgtctcacccactgaagggtagaccttggttaaggttaaggatccttgaaggtttaggatccttggcttttacctgcattcaattacccacccaggtattgcagcaaccagaagtcccgcaccagcttctcgccatctcccgtggagcagactgctctgggcctctgttacaggacggattaggagtcaggattctggaggtggctgcagtcctatggccaagccggtacctgtacctccagggatccgcattcttaggagggttttctgaatgtagggaaagagagcaccaggggacactgctccttcagggtcacccaccagcccctcatggcttcactcagccaagaagcacattgtatctccttggggccctctggcatctcctctgccttcatacttggtcctgggttgcatgcatttgggatatgttttcacaccagagagcttgctagacagagcccaaggggatggaactgagtgaagtgacctataggcctacttctggccaaatctcagggcccaggtccccggcacaggtctttgctgcgtgtgatttctgccccttcatgggggaccaggaggctctgcagtcttttggacattaaatgatgcttgcaaaacaacaatgtgatgagttaggaatgaatcagaagcagacgagggacatttaaaacctcttagattacagtcccaccaacagtgtaaaagtgttcctatttctccacatcctctccagcacctgttgtttcctgactttttaatgatcgccattctaactggtgtgagatggtatctcattgtggttttgatttgcatttctctgatggccagtgatgatgagcattttttcatgtgtttcttggctgcataaatgtcttcttttgagaagtgtctgttcatgtccttcgcccactttttgatggggttgtttgtttttttcttgtaaatttgtttgagttcattgtagattctggatattagccctagttcaaccattgtggaagtcagtgtggcgattcctcagggatctagacctagaaataccatttgacccagccatcccattactggatatatacccaaatgactataaatcatgttgctataaagacacatgcacacgtatgtttattgcagcattattcacaatagcaaagacttggaaccaacccaaatgtccaacaatgatagactggattaagaaaatgtggcacatatacatcatggaatactatgcagccataaaaaatgatgagttcgtgtcctttgtagggacatggatgaaattggaaatcatcattctcagtaaactatcacaagaacaaaaaactaaacactgcatattctcactcataggtgggaattgaacagtgagatcacatggacacaggaaggggaatatcacactctggggactgtggtggggttgggggaggggggagggatagcattgggagatatacctaatgctagatgatgagttagtgggtgcagcgcaccagcatggcacatgtatacatatgtaactaacctgcacaatgtgcacatgtaccctaaaactttaataaaaaaaaataaattaattaaaaaaaacaaaaacaaaaaaaaaacctcttagatactcattccctcatgctcacgttcctccccaaagaacctcctcccttcccagggagagggtcttggccacatgtgtgggaggctctgcaaagccagtgagctcttccacccacagcagtcccagggccctgacattcctccttccctttcctggttgccagactttctagaaggaagccatgtattcgggcacttctgaagggctgggtgaaactaggcaacagacttctgcacgttacactgggaaagccagtgtgtggaggtgcagcgtgacctgaaccagtcctgagaggccaggtgtccacacttggctgtggggcttggctggtgggggcagggcatgtagcctgggtacagggaggagggggactgcccagaggcactcactcttaatttggctttctcttcgggtctcattatgtgtcacttaatgtgaaaagtctgctttagactcctattctaaatcaccttaacctttcatcttgccctgtggtgctcttggctcctatagcactgaaaacaatgtgtaattctatatttatttatatgtttattatctgtcacccccagtagatggtaaactgcatgagttggggtcctgtgcattgcaagtgctggcatcttagtagctgcagaatgaataaacagtggcagtagcatcctctccggctgagtttttagagtaggaagtaggcagaaggtttggggtcatcttagtttgctcaggctcctataacaaaataccgcagtggggggactacaaagacggaaatgtatttctcacagacctggaggctgggcagccccaggatcaaggtgccagcagatttggtgtctggtgagggccttcttcctggctcgtggacatttgtctcctcactgtgtcctcatatagtggaaggggcgagggagctctctggagtctctaagagtgttaatctcattcgtgagtgctctgccccatgacctaattgcctacgaaagcccctcccccaatatcatcacactgggggctaggatttcagcataggaatttggggggacacattcagtctgtcaccatgtacatggactgtgcagtgggaattaccctgatttgaggagtgtttagggagggggagggcgagctggacagacctgggatggctccgcgtaaaccgtgtctgcagcatcctgggagcctgcttgagatccggcccttctaaggagctccaggagacttacaacccagcccttggaaggagatccagagggaagaaggccagttgatgacttatgaaatgtggatttgtattttcagaagtgcagagtagtattttaaaaaagcagatgagactctgagggttgggagaatggcagagcatgggaagtggaggctgcttcggatccgagaggaggcactgtgagatgtggaaagagcttgggctttggaatggaacctgcatttgattctagatttcaccgctgagtagttatgtagcttttggccaagtcacttatccagtctgagactcagcatttttatctgcaaaatggggctagtaacactgccctctttgagttgtcatgaatattcaatgagatgatgtgtgtacccacctccctacctactcactgtccaatgagtgtttgttctttgttccttttctctcttgaatagccagcgtggccagttttaaatttctcttgctctccaatctagtctaatttattctgtcagctgtcacatctactaactaggtagtccataggtgcatattatatgcatgtaatggacccattgttgtgtgaagggtggtgaagatttaggagcacagatttatcctgcagaccatctcccacatgaatgtgttcctgggagaatacattttggatttttaatacccatgcttcgtattttatacacatattttaataaaatgattttaagctgctgtttatataggaaattatatttacagcctccaaatgcaatataacattttagtgaaaagtcttgagttacatttcaagtacagttgatagaatgtgggaatctcttgtgggtgttgtgtagagcccgtcgagtgtcaataaaggggacttgctttggggatgtgtctgggccccaggaccacattcgaggagcatctttcccttcccaaggcaaggcatcttggctacatgtgttggaggatttgcagagccaggatttgggggatagaccaggctgctttcccgacccatgacacacctggactcttcccttccctttttctggctgacagtcttcctagaaagaggtcatttgtttggcccctccatggggctgtgtgaagtcagctgacgggcttctgcacattaagcggagaggtcaggagcacgttatattcattgtgatagtttgtgtgatagttctactatataatagacattatgctgtattttgttacttttaggaaatacatgatgaagtgttttggttacattttaggaaattggctttgagttgacatgtaatgcattataatttttcttatttaaaagatgagaaataggccaggtgcggtggctcaagcctgtaatcccagtattttgggaggctgaggtgggaggctcacttgagctcaggagttggagaccagcctgggcaacatagcaacacctcgtctctacaaaaaaaagtaaaaaaaattagtcaggtgtggtggtgtgcacctgtagtctcatttattctggaggctgacacaggatgattacttgggcccaggaagttgaggctgcagtgagctgagagttgagatcgtgccactgtattccagcttgggtgacagagccagaccctgtctcaaaaacaaaacaaacaaaaaaaaccatgagaaattggctagcgtttcccacagaacatctgactttcgggaaagtcttattgatgtgtgccttttttacaaatggtccctatcttcaaggcgtggatagtgtttttagggagacagaacaaacaataagaatggagcattcatataaggaacataacaaatagcacaaggaggtacgcagccaaattagtggacctttgaggacggcagggctggagaggatgggtagcaaccacatacgccatggctcttggaatttcagactttagcagtttctcaatgaatgttccttaagtacctgtcatgcacaggtgctgtgccaagtataaagtgataagcaaggaagcggaaaacgtagcatgatgcccagcctgaacttctctatgtctaagaggaatgagaagacattaaaaacacacagcacaacatgattcaaggtagaaaagttacaatgtgctaaaagagaagaacagctagacaacgcactgctcagagaggggagatgacgtgcacatctgagaggttgctgtggctttggctaggacagttatcttagctgagatggccttaaggcaaggtcttgatgagggctgcccatgttattaacacctggcactgcagtgcccgttagagtggatgccgccggctgagggagctggcaggctctggagccctctgtcccctaggcataaatctgctatgcagtgcattggagggaagctccagggacctaaggaaggatgtctgggtggtgggtggcatttgagggactcagggcactgatatttaccaacccatacagtgttttactgtttaatgaccagtatgttttaccatgcacagtagctgaagatcagcccaaattggaccccaggggtaggtaagctaatgaagccagaggtgtaggctatccatcctcttttgtcccaatccaggaaatgtattttacccaataacaacagtcctgtgttcttggagggtgttccacctggcgtaacctaagggtctaacttagggtttaagtaccctacattgaaataatagagaaacctgtgacctgaccactctaatgattctaatcaaagtgctccagcactgtgatccctgccccagacccctgggcctcacccccatccagtaaatagagggtttgtgcatggcaaagctgagggccgcagagccccgcgccagctctcccggccagcagcgtccatgctgatggtggtgtttgtgcagcacctggtatgaaatcttgtagctatcacccccctggttcccatgcctgccacttctatcagtaagacgcagcgagtcacacagtaccacagtgaagtcttggttttggatgaggtatgtgattataagaatttgtttttataaaaacaataatcatcctaaaaacctgtgtaagcctcccctctgcaaaccagtatggtctgaaagaaaaccaagtaaaacaaacaccaacaatccttatgaacaaaggagtgggaaggggtatgttcgacggttgtaatagtaagaaactcacggggaggagtcatagtgtgcttgaagtttggtggctctctgaagacaaatggcgctccatctgtgtgaaagggagcgagggagtgggggaggcacgcccgtggctgctctgtagctggggtgctgtttcataaggtggttcactgactggtaccaccgtcacacagcgccctattaccagttgtttacccaagaataaagaatccgaattatattttagaaatacaatttagggagctgaagtttaaaataactatcttgagcttcagaaagctcatctctggaaaatattcacagagggatatttgtacttccaagggaatctgatggggcaagaagcaagtcagatttctctacttttcagttaatggactccttaaagattatgttcgtattcctttaaaatagtaattgctttgtttcctcaagagccaagatccatccagtccctaaatcaaattctcaactaaaatcagaaggtttaagatacagttattttaagtgctgcatactcttaaaaatgtgtgtctggttatgttgtgtatataagtggctcatatcagagatgcagcaagtcaagctatataaaattcagtaacacatgccagagaaggaaggagggaagagagagagattgaaagagagaaagagatgcttatccttttctccaggagaggctcgaattttactttcaacttgtttctaaaaatggcagatgcaaagtaagaaaacaaatgtatctgttgcaggaaggaaggaaggacagagaggggaatctgatcttcagcctgatgtgatatgtttttatctgaatgcttttgcaatagaacatctgggaggcaagtgagaattggggtatgcctatgtttcaacagtttcattagggtcacagacctttatttcccagggctgtgatagaaaatatgaactcttccatagttgggagttgaggaaggggtaggctgaaacagtggcatctgtaacagtgcatgccatcagtgggatgtgatgatagtgcttatcacaatagctttaagacttatgccctctttctttggaagcatttaaatagctagccttgtttctctttcctaggaggaagcctgggattgatgttggtacctccaacctgaagtctgggaaattggtggggggtttgttgactcaagtttataagtggatttttaacccagttcacgtggtgcttgtgctgacactgacattttgtgctgcatgatctggaagttgaggcaaacattatcaatgttagactggcagaatctgagaggacagggtcccagtttcaaagtttagaaacatttcattgatcaaagtgtattagagaaaaaagcattaagttaattttttcattcagtcattcagtcatgcaacatacctttcttgatcatctgccaggaccccagcacatttctggaggctgtatttgggggcagattgaagctaggtgcagtatcatctcctctctggtaactcctttccaattgaatctgcagctataactggtattttgtgccacagagaaggaagaaagtatacaggtgggcaagctgggattatgtgtatcaagatggttatagtaatggaggaactatctcttgggatgcattttagcagaaaggaacataaagcattcaaaagagttctattctctagttagtgtcaggactgacttttctttgttctgtggtcaaggaaggccctactgaaaacccaggaatcaaggtgggtgtttgcatgaaggtcccttcagcgtcagcaatgagagcagtaaatcaggcagagctccctgaattaggagtcctcccaggcagtcaggtcaaggtcagatttaatttgggattttgtagtttacaggatgctacccactttcttacacctcacagtaaccatgttccagcagcttattggattggtccaggctgtgcctggtggtgagaacgtcaggttttgtgggcacatggcttcaccaggagaggtctggggtgtctcatgttggtagagaaggagtatgtccgtggactctaacttctctagaggcaatgccaaaggcaaactggatagctgttgctgctgtagttttgtaaatctatgaccctctgttgaggcctctttaactctagcagccttatgcatctttatgattaattcagtaggaccccaccagcagactctccttcttctaagagtgtaaagtcattcatgcaggtttggccttgcttggaggttagggcttggggggacatgagcagggcttgccctcaaattcccagtcatttggctcctcctttctttcacctgttactctttctgctgctttttttttttttttttttttgagacagagtcttgctcttttctcccaggctagagtgcaatggcatggtctcggctcactgcaacctccgccttccaggttcaagcgattctcctgcctcagcctcccgagtagctgggactccaggcgcccaccaccactcccggctaatttttttgtatttttagtagagatggggtttcaccatgttggccaggctggtcttgaactcctgacctcaggtgatccacccgcctcagcctcccaacgtgctgggattataggcatgagccaccgcgcccggcctctttctgctacctttacgttatttacacaagcttggaggcctagaggcaggagctggtatttggatcaatggctgggtaatccagagcagttaaagaaccaagaaattattaatattttgttccaggttatatgtttttatggggtgatggtgaaacaaagaatgaattttgtttcctaaatgtgtgtttcttgcactgatagcaaaattagccactgtttacatttcctgagcactcatcagcctgtggtagagagaactcaaaggtaagtgtggttgcaaggaaagaaaccgggaatccagtggttgccgctagcttcattcaatgtatagatccagattattacatattatctgaattaaacaattttactttagagagatcatgcaggttctgtgtttgaggaaatcttacggttgcttataaaggaaatcattgccccaaaattctggatttcaactaatctgatctgcttaaagcatgacacctgcatacttgctaacttattttttgagaatagagagttagatcaggaataggattcagtccttagaatgcagagcttataattttagaaaggtatgtattttatttaggccaggtatttttactgttaatatatttactgttttatctagaatgttgactctgttatgattgagtcagttgccccttccccacttcctctttcctctgtgtatttattgcacactgactaagtgtctggtgtgacagcaggtgctgcggtcatgagggtgactagttagacatggtttctgccttcatggagcttacagtctggtgggagggatggacaaaggaagcacagaactggacaccatgcattttctcctctgacatcagagccaaactggaagatcctgaaaataattctattgcatgtcccttggagatattaacacattgctcagtgatgttgattgttaaaatatcctcttgtttggaattgttatcacagtggctcctctggcggtagcatgcttataaaagcaaccaggaactgcccatgtgcccagtctaggctcctgactcccacagatgcctctggggctggggcccggctaaatattttccaggagaaaagtcagtcaggagccagcgcctgccatttcccattctttcagagccaaggagctggacgggcatctgacagcctggaagggccctgctccaatctggaactgaggttaacgcttcaggtcagctacttcctaagggaaggaaaaatccctcccagggatttttttactttgagctttctctggtgctgcttgttgctggccttcagattttggccaccactatcttcgggtactattttctctgcctcccttggagaggtgaccttccccttctgtgcagggccctgtctgtcccatgtggtcttccagggctggggtgaggaggaggcggcgagattattgcctgttacacatggacatctagacgggggaagaaacataacagctttatttttaggctttgctaattctcactcttctcctagttcgctgctacctggcaacagcttattgtcatggcaacaccgatgttaatgagtgaaactctcagtgtgtctgctctcctggtgctctgacagacaccgtgtggagctatctttctggccatcagaggctaaacgctaggcttccttcccctctgcaggcctcccaggccccgggccccgtccacagagggaaggcacggaggcagcgttgacaagggatttatggctctgcttacacattcccagcttctcctctcttcacggatgggctgctgctctcgcactgcccctcctcccgcagtccatccgtccacatttttaagcggtagctgtagcccattttctcatgtctagggcacctcaagatttgagccggtttttacagcaccttctctgcagttgatcagcagggctgaatcgcgagtttgggagaggagatttgtggctggaactggcgctcacattggggagggaagacctgcaccttcagctcttaggctgagagtcagtaacaccaccatagcttcttgtcttgcttctctgacatctgtccctcaagggtgcctttgcagcattacaataattgtgaggaagagcaggcagagtctgctccagcctccttgtgcctcagtttgtccatctctaaagcagcgcatatctgaaattggatggtccttaagttggcgctgctgaggaggggttcatgtgaagtgctctgggctcctgctcaccatttctatgatgtgggtaacttgctcgacccctctgtgactccacttctcacttgtaaataaggatagtaatagtacctacctcagagtgtcattgcaggactccaaccagatacatatgtgtccggggcttataataaaatcatggttcaataaatcttagttcttactacgtgtggtcattattcagtcttcacactgatctcgtgaactaggactattattcttgaattacaaagaaggaaactgaagcatggagaggttgagcaactgccaaggtcgctggaagcaacatgaagcctaggcgtgccctgagtcaccacactgcacattgcaaggtgagcctgaaggggatggccctgtatgccctcagtgacttctccctgctccggggaggtgggcccgggaccccaggagtgtgcctgaggaccttgcactccttggataagaggtgtcaccgccagcccccttcctgtcttccctgtaggcccagcactcattcacaggcagacacttctagttagcgcacatggttgatggacatgtgaggttcctttgaccccatcccttctagtctatgcttctgcttctttatctagaaaatgtgcagccatgtctcatccccgccaaaagaggtactcaagaagagagaagaggagtgttcagtgtcttctccccacgtcccctttcccccagcgaggcacaggggctctctctgggtttggactggagcacctcatgggtgtgaagtcgggaggagccggaggcagtgaggacctgcattgcagcgggtgtgtcggagggctcagcaaacgtgtgctgcatgagatggggaaacgaagccatgtttgccggcatatctggggttccctggtcactgagacatcagagacatgtcaatctgagtccctttgcttggatttaatctgctatttgtgggtgttctgttgcattcagtggggcttcagtcttcattttccttgtcctttgcacttcctcatcattccctttctgcgagcttgcccacttgctaggatggatcctggtcagtggatcaggtggtggtgctgagggctctgttaccctgatggcttgccagcttgcagggcccagcatgcctgtgagggcaaaagggttctgagtggggcctgttcctctgggtgggatgcgctctccctcctcctaggcttggttcctctccttcctcggggcctgattcctccagctcatgctctgtctttcctcagagctcctaccacagtccctgtcccccacactgttaacacttttacatcagcattgcacatggacataaaggggcactgcagccagtcccctgtggaggatcaggatgtcccagcccttcagggacaggctccagggtaggcctggcagagggaaggaccatgttctctcccaaacaggccagtccttggagctgctgccatggcttcagcttccagtaccctgtttggagggctctttgcaaagaggcagaagagccccaaggtgagttgaagggccctggagccccaggcctgcctgcctggggagcagctgatggcgaatctgtgtcctagaacacgccctgctgccaccagtgtgacatcagccgtggttgtgaaatttctgacaaagatgctgggaactcatcctgttctcgaagtcaccatgccgcccatcagttgacatgctctgttgtcaagaacacaagaaccagagagaaagcacactcagcagagatgtgtcctagggtgttagaggaaggaaccccatcacaaaagaaaattagcaaagacagaactgggcaaaaccaccagaggtccctggggcacgccaattaactagctgggagtcttgggcaagagcgaggggaggccagggcttagggatgaaatgtgaggatggggaggggcctcttgagctggctcagtgcctcagtcgggcactggatatggactgggaccacatcttctggcccctcttattgtccctactgccttgaaaggactagattataattacctgaaggactgagtaggcctagaaatacttccctaactgcttactcatatcaacattccttccaagaaagaagcaggcacgcagtccacaattagagataaaaggcttcaactggaggaggtaaggccgtggagcgaatgtttcagttggaatgcaatcagtcaaacaactagggcaattgactggttatcaaaccctcctgggttttgatgggaggaaagaagaggaattactcataaggcagagttttcttaaataaagagaagggccccccagaagaagaggcttcaggacactgattcttactcttgtctgtacagtagaataatctgggcagccttttaaaaatactcaattcctctgcctcaactcagaggagttctgattcagtggccttcatagggctgggacatcagtattttttgaaagcacccccaggtgattctaataggcagccagggttgagaaccactggtttagaggtgtttaaagacagaaggcaaaatgtgtagactccagcacagaatttgctgttttccaggctgagaccaatagaaagcatatcctgattttaattcacagcggcacattctaaaagtatactccaggatttaaaaagtctaggggcttttggaaatatttgtttgcccatgttcatatcaacattatttgtaatggccaaaaagcagatgcaatccaagtattcattcgtggataaatggataaacaggatgtggtatatacatacagtggaatatcattcggccttaaaaaggaaggagatcctgatacatgctacaacatggatgaaccttgagaacattatgctaaataaaataagccagacacaaaaggagaaatatggtatgattccacttatgtgaggtacccagaatagacaaatttatagagacagaagtagaatggtggttgccaggggctggtgcagggggaagtgcggagctgttgtttaatgggttcaggatttcagattttcaggaatagcaaagtgttctggagatggatggaggtgatggttaaacaacaatgtaaatgtttttaatgctactaaattgtacacttaaaaatggttaagattgtaaaatttatgttacatgtatatattttaccacaacctaaaaaattaatttcagattaataagaatcatctattttaatatttgagaaaaacagaaatgtataaaggagaaaatttcaaaattaccacttgatatctagatgtattctttctctgcatgtgcttaatcatgcaaatacatacacacattgaatcttactttctatgatggcttgcagtctgggttttcatttgtacttgatttggtttaatccttatttcttgacagagatggttccatctcaagggtggagtaagtgaggtgacatagtaggtgggcatcctaacatatccgtatattcagctttggaatcagacactactgggttcaaatttgcacctgtcatgttcacgatcggtgtgaccttgggcctcattctgagcctaagtgtccttatttcagacttgtttgggaagttaaagataacttaggtgccaggtccctgctcaggccgtcgggaaatgggagctgtaactgcagagtcaccggagacttccacggacacttttacgtacttgagatagatattcagtctccacttctacccgtctaacttaggagagagcttcggagaagccctgatctgagattcaggaagtcgccagggctgccacatggtgctgtgaccttggcaacaccagattctttctcggtctctgttactacatttacaaagtgaacacattgggttttggggtctctgggctcctcccacgtccctactctagcatcctttgcctctccgtagcctctcactccctgagatgcagggccctcagtggatgtccagtaaatgtttattgacaacgcgtctcctgcaggttaatcatcaacaacatgcaacaatatcccagatatgaccggctccctccaaagagagaaacctgctttatggcaaactcattgacttttcttcaggaagaaaatttctgctggtgcagcaccatattctgcaggagtttggatagggtgtgctggaaagacagggatatttttccctaaaggcagtgcataggggcagaggggcaaaactcccttttttattcctgtagtgcttgtactggggcagaggaagcagatgcattaccaagagcgtggaaagaagtcctacgtccagcctagagctcagcgcatctttcagctgccaaatggaaggtctctctgtggcaatgctggggagggaaattgagttaggatggcttgttccaaataaaatgctatatttaatttcactctgggaaacatttgatgtccgggctactgtaatacgtgaaatagatttaagaagatcctttttttgttagaacaacagaaaatacaaaacagggaggttctcagatcagttgcaggttgcacgtaggggtctgatcatttcagtgtggtttttaagcatctggcagctgctggccaacggttgactagtcagtatctagcagcctgagtgtcactgtatgcgttgaatctgtctcagtagttcagcctctgaaatgcctttcaagttaagccaaggcattcggcacaggaatgggaaactgtcagtttgtaaatctgggatgtgtatttgtgtgcttgacatgtggaagggaagggttgagtatgaaccaatgctgagttagatcaacaaatatgtatctgactatatgatctaaaaatcagccaggtagagttccatctccagaactgctgtcccttttatgatggtcataagcgccatggctgctggacgcttctctccctttgtggagctctgccctggtgcatttctgggctaactggccatgcagggatttggggaaggagctcacagacctactttacttttcacattgttcctatcccttcaggcttctgcctgtttccttcttgactcctgttactttttagtgtgaggtcagaaaaagctcttctcccctcttctgccttcattcatttaccattcagaggacctcactgaagtggagagaccaacagatagggctgccaactcaaccctggaaatgctcttttcttattttacctggccatctagaaaccaagtgttttatttttttgtccatttatttaaaaaaactacagaatgaagtatttttggggactgtgccactctttcgggctgtaagtagaaaagaacaaatatatccttgtccagcttttcctgttagaccctcagaggaagaagctccagcccgtaacctgtgaggctttattccttggtgatgatgtgaattagagagaaaagctaatctttttgaatgactatgaaagtttctctgtggagcatctgaaaccctggaaacacttgctttcacgaacactgagtgcacccttatatgtggaaagaatttcagaggccaggtatcaggagaggccctgggagagtaaggaaatacaagcagccttttggcctgggatctggaggcctggagtctggaggcctggtgacctaggcagtggagggcccaggagggaggctttccttgaagagcactctatgatgttggttcagctctctgacattgaatttgtcatgagaacccaagctgctttccatgatagaaaggatttcctcctcctcagatgctgagggaaatggttctttgcatcctgcatccagaatcagcacaagacggtggaagtggtcagggaccagcatctgggctcccctgttctccaactggcagtgctgtggggtccctgggcaattgtacagaaagcatgtatatagagtcagatagatatgtgctggaatactgacacaattcaaagctccctctgctcaactcctttgagctgagcttaatccatagctctctgaacctcagtttcattatctgtaagagtgggaatgatgatactgcagagttgtgaggcctgtgcatgctaacgcatgtgatacaccagctacagtgctggctccctggtaaggctcaggcatggggaactggtacaagcattacctctgccctcccatgagacagggggtgctgatatttggtgtgaagaggtgctgacactagatgtgaaggggtgctgatactaggtgtgaaggggtgctgatactaggtgtgaaggggtgctgatactaggttgggttctcctagatcagtctgatgtaggagagccatcttcagctggagctttgggatctgtagttactgaccagtcttgactcaccattgtttgtggtgtctcttgtcttttttcacttgtttccggaaggcagctggtggtaagttttacattagttttagcttgagtattatgcttggttagcgcaatactaaaattatttcctttttcctgtgcattcatctattcaacatgtatttatcgaggatgaactatatgcgaggcactttgacaggcactgatgatgctgtgcttggcgctgagcgagagtttacattctctgtgcatatgagggcaagaagagaagagagagaaaatttaagatgtaagcaaataaatgagagagcttcatattatggtaggtgctatgaaaaagaaatcaaagagaaacaagcagagttttgtggtaacatgactgtgggtgggggttactttaagctgttggtcagggaggtcccctctgggacctggaagacaagaaggagctaggcttgcaaagaaagagaggaagagccttccgggggatggcatagcaagtacaaaggcccagaggcaggacaaccttggcatgtgtcagaaacagaagagcaaggctggcacacagtgaatgaccaggcgggtgcaggtgaactggtcaaagggttggcggtgtggggagagggagtgctagatcatgactggtagggagggtgacgtgtcttttttatttttagaataccatcattctgcctgtggattagaaaagggagttgggagggaatgagaaactggttgggaggccagttgggtaggagaatagaggctgggaccaggtgccagcagtggaggtgagatgaatggacagaatttggccagtgggatgaatgcaagtgcctgggaggcagagttgccagggcctgctgggcagttgggcaaggaggcctcaaaggatgccaggcagtttgttcagaataaacatcaacagtgaaagtcttgtcaagagtgttgggaagttggacatttttagatacagctgatggcagtgcagaagttccactcaccttggagggtcatttgacaaaatgttcaaaggcttcaaaatgctcatttcttttggttcagcaagtccataggattttatcctacagaaacagtcagaaatacacaaggattacttacaagtgtgttcattgtagtcttatttgtaatggagctaaacctgggataatttctctcctctattaatcaccagagggctgggtaactaagttaggatgcgtccatatgatggaacaccatgtagccattcaaatgataacctagaaggacagttaatggcacataaagatgttcaactgcactgctaaatgaacaaacatagaaagttatctacaatatgatcccaaattttataagatatataacctctatttacatctcatatgagtgtagacaggatatactataccctggaaggtataataggtatacattagagtgttaatgataagccaattcagggaacaaaattacaaattattttatttcattctctatttatgattcttctaaattttctaacataaacatttgaaataaaaacttaaaaaaagccctgttatttgaaaaaacttgtgatgtcttaccatgtccaagtataaactgaaaagtgaataaatcagtgggctggtggcccttcttaatacactgccatacataggacaaccatttgtattcagaaagtttgtgttgagtaagtcactggatttgagtcagaagacttggagttggagtcccagctcagccattcactggctttgtgatcttgaacacgacgcttaacctctaatgcacagactcttggctgcttcaatttgcagtgggaatgaatggtgataacaagaacaagaataatgctttcacggagttgtgaggattcagtgatagggaattagaaaatattttgtaagaggaaaaccacaatgtaaatattaatatttcagggcccaagtctttgacatggacgtgactatgggcaccaatagatttttggatggatcatttatggtaccctgtcgtgccctttagtacacctttgcctggtgtacatctcatgcaaccaaatggccagctcacgtctgatcccaagccctgaattaagtgagcaatctgaacatgagggacaatgagttgtcctgagtggcaggcggctctcaagtgaggagtgctttctcattcactggaaaactgtaagtgaaatgctgcttcagcagccacacccagagcccctttgatacatggttcagctgttctgttacataaacctattggaaatgaacctgcaaaggagttgagcagagggaggtgcccattggaataaggacaaaggagaaatgcactacctctccatttaaaggagacatttgctttttaatggaccctaaacactgggatctgaaatgtcacaatctttacatactggaatggacacgcacataaatgctgatgaacagctcagcaggcacttaatttttaaatccttgattgttcaaggacagggatatcctacttggctctgcaagactcatagcatactggacaatgttgtctgcatcggaatgtcttactggggagtcacacctccaaaaagaagctgtgtggtgaatgggtccaaacataagggtttgagcccctgttttcagctgggatttttgggtaaagggagatgaagcagccaggtctaaccaactgcagaggtttatttcttggggactcccagctccattgaggtgtagaaaatatagcacataccagttaccaacaaggatacctgttcctggatggaactgcctggttggaaagaatgctggtggtcagtagtgccttctgatcctaagaagaggaccctaacctggccattttgaataagggccccatagctgctgattaagtgtgtcaatagtgggttccttgtgatgtaacattcatcgtccttcctgtggtggatgaccctacagacccacctgctgataagctaagctgcttgcttaaggccataaagctacagaggtattaatctagagtttgaatcggatctctctgactctaagactcctgctctgaagtcctccattatccttcctcttatagagttgttttgccagtgctattggatttgaattcaattgtaccctacgtacattagaatgaaaatgttatacatcgtagaaaatgaataaatcatggttccatccctcaagaaacttatatgtattattatttaagagtttgaagtgcatagcaagagctcaataaataattattgagtaaatgataatacacaaatatattctagtttatttatagatatccataaccccaatcagattatgatgcatctcataaaaggtgcacacacaaaatcccatcggagtttaaagacgggagagaatacctctggagaaatcaggaaaataaaagttggatgtatcatttgagatgggtcttaaagacctgtaaacactctgacaggtagagatggtgaggcttggttcccaccctgaacctcctgcctgctgattggttcctgcagtagaccctaggtgccctggtttgtttctgctttgtaattccacttcttaatgatatcaacaactgggagctgggaaatgaagtttttattctgataaacctgacttgccacaagaggcctacaagagaaagtatgatttctggtctcctctccaccgtctccgatatgcaaacgagtcacacatctgtatcttcattctagagctctcttttgaactgctaatccccctggcggagcctctgatcctggttatccagcattcttctagatttaaggttgaaacatgatttaaggtcatgaatgcatgaccttcccagactcccttgtacatgagctcccacattcccagcccctgttctgctccaccccttgtggtgatagccagggtggtcagctgcattgcatgttagtagtaagggaagaatggggtggtgggtccagagttgtgtgttataagatgactttggaggtcaggctgttgttttggctcactttgggattttggggagtagcttactttgccatcaatttcctgatgaagaaaaggcaacttagcattcttcgtataagtaaacaggtcagtgttggagataattacatcatgaagcaccgtgggtcccagaggtgggaggcctcatgtaagtactactgtgctattgccatcattgtctggaggggatgataatgtcgtatttgcttgcaaaatggttttctgatgttgggttgaaagagacggttatgtaccttagccaactgttagggctgtttttcttctagcacaatttataaagtgatttttgtcacacccaaatttttgcaggaccgcagaactcagacatttaaggttgtggcttttcagaatggatgaataaacgttcgcactctaaacttaagagtgtgaaggcttgtcaaggctccatttctggtttgctttctgatctcatgcaagtcacttcacctctctgctttttgtttttccatctgtgagacattgctcactttgccaggatatcttcaatatgaagaagataatgtgtggaacgctgtcagctgctgcatcattaaaaagcatttattcagcacttatgtagcattgcacaaagagaattataaagactagatccctgccttgtctgctaggttatattctaatatcttcttaaaaaggcagaaactaggcaactaaagagagcaataattcaaatgttatcttttaagctacacaaataacagtagcataaataattaacaagcaccaatacgcaaagaaatcagttatcaagaatacacagaaatagttatcaaaaatacatagataaaattatcagaaatttctcaactttctggagccaagtcatgcaagaacctggttttatgtaaatgaaattgcgatactgccccctggaacctgagcaagaagaagatcctagtgggcggagtggggagggaaagtgttctggagagttttacttgggattctggtatttgggtttctgtcactgtctcttctccctccaaagtcaactaatactcagacattaaggcttaagaccctgttaaggggaaaggtctatgctttagagaggatgctgtagagtggtaggcaaccatcattcctcttgtgaatattgtggtcattgcattatgggccttcattgaattatgaaccatcatgaggatgagatccaaaccaagctggatggaaaccacatggatgaggccccagagagtgaggacgccatacaaatgtaatcactgagctgtctgaatcatcttgagaaaattctacaagtctgtatacatctgacttccccatcagttacacactttgaaaggaaagctctagggagaagagtaccatttgcttccccaatgctaggagaggaaggtgatgagaccgagattactaactaaattatttcctgtgacttcttagaaaagctgaactcccaaggtatgccgcttggatatggggacgcgcacacacacacacacacacacacacacacacacacacacacacacacagttttcttcatacaggggtagtaaaacctgtcaggaaattaattaaattagctattatttgtgtttctcttatagtttacagcatcctttcactgatttgatctcatttgacataaaaagactagctgtcaaggtaggtgagactaagattaatcatccccattgtacataaaaggaaaccaagactcagaggttaaataacttggccaaggtcacacaaccagtgtgaatctggcagagaccagatttagatattcactgtaataccctgactttctctctggaagatggtcagcagtctaaagccaatgtatttaaataccacctatcacaaattttgcatacaaagatttcaagccccatctagatacctagttttcctctccatatctcatgtttttaaattactattttgtgtcaccatagtgcacagcatgcttaagacctggcttgctgctcttaataattacatagtgtcattgtttcctccacggagactcacagtggaagctagcaagccaggaacttgtccttcactgcacttgggtcttaaacagctacaaaatacaccgagtttgactcccatctccctccagttctcgagctctctgcctgttggttttcagcacgagtttcaagtattctttcggcaggagaagggctcttgaaaaatagcccatcacagtgcaaattcttttctaatgaatgcgctgggcaggcaataaatctgaaagggatgcatctgaatcccggtccaggtggaagatgctaaactggcctaaggttttcaaatatgcctgtccttagcccacttgcagatattgctgccgttactgctgatgccatggcctgtgtggggaggcagtcctcaccaagaactccctccacaactgctgggtgatggggggattgctgcatgctttctctgttccctgccctcccctttttagctattcccctcctctctgaaatcatcccctcctgactttagtccaggatctccttccagctcctcgccttcctctaaccaggaccaactttctggaaaaatggttcttgcacttcagtgtcaattttccccaagaacatgagcatttcaagctttgagtgctgattcgggaatttatccagtcacaggagtttcccagacagacacttcattctgttgattcagagtcatagtgactctgtgatcagagggacttgagtttgaatctctataccacctttgactgacttttggcaagttacctaacctttcagagtctgccaaatgaagacaatgctattgtcctgttagaaggattaaatgatatcacataaagtacctggatgtgctcagcctgtggtgaatcattatatgtcagttccgtttttctgtttctctcctgaagaactcacaaagcctctttatctgttcaaggtcattggatgacttgctaagaactaggcagaagccaaaggtcattctcccatcagttatcactcctacttgacaatacaccccaggtgtcaattagtttttggtttgacctactatattttactgattctactgatcctaagacatgttttcccctacattttcatttctctaaaactaaagtgcaatctaaactaataggttacactttagttggcaccattttttctttctcattgatacataaaataatgggcacatcttacaacttacaactttgacttgatggacatatggtaattatttttaaacacctgactttaaattccctgaactcaaatggcaaacaactgccctgacctggtgattcttgatgcagtctcttcccaggtgccttgtgctggagcgtctgcaagatgtccttaggtggtgggctgccatctggataaaggggcagcaggaagaagagtttctgggcttctgggacacatgtgaatagagtgcaaatgacacttagggttgcattcttgtgtcagagttcagttggcttgtgcaaccccgcccctgtgtttggccccgagatgttttcccacaccttacacagggaactccctatcatgtaatattcaaagtgggcttttcaaccaacatttattgagtgcatactgtgtattaggccctgttaagcacttgacacgtgtatactcttttaattaatatgattactccataaagtaggtacttctttatcttacacaaacccaggcttaggaattaacttacttgcccaggtcttaaactcagatctgtctggctccaaatgtcctgatctgaatctctctgtccttctgcttctctccaagcctgagttggcaactctgccttacctagtggcaatgacaaaacagcataggagttaagcctgagttttcgttctcctaagaatctggttgacaaggtatgtgctaaagaggtaggggtagcttatagagtttgtagaaaaggggggatggagaggaggaaaacccagtacagattttgagcctttctgagtgaatattcagctccttttctccaggtacactcattccatcatttcatctctggcactgtgccagcatggttccagggccaggggtgactctggctacctggcatgaacagtgccccacttttcccatctgtgactttttctgtcttctgccttgaatcagatatgccccaggtgccagggaaagaggagtatgtgcttgatggtctgtcaagtcaggtagaaagaaaattaacatctctaacagtgagtgattgagatggagtattttccaggagctagaatattatgtgtgtgtgtgtgcatatctcctggaaaaacagagaggaggagacgctcctgtagcctcaagagagctcagtttggtagtgaagacagcagatgtatgggcccattactattagcggggcaagttcttaggggtgtgagaaccaagagaacggttgattggtggaaagagcacaggatttggagttctgaagagcacgttgagctttgtcttttccttgctggctcacttgggcaagttccttaaactccaagctttagtttcagttttataatgtgggtagtccatttttacctcggcctcattgaaagaattaattagacactcagagtgcaggcttgatacaggcctcttccagggcctgggatgtattaattgctggtgctccctcagtggcagccttgatatgcacacctaggaatatatacatatgcgtttgtatatgtgtgtatgggttttaaaagtccgtccttcattcatcaaatatttatcgtgtatctgttctaggtgtcagggagttagcaataaataaaacaggcctgaatccctgcccacggggagcttacaatctagtagagagacaatgaataaaataagttaaacacactttgttgggtggcagtaggggctgtggagaaaggtaaagcaggggaatggggtgtgagtggaggtttacttttaaataagacgatgagggaaggcctccgcaggggatgcctgagcaccatctatgggaatgagggggtcagcagggtagactgacattcgagaggaacgcattccaggcagagggaattgcagttacagacactgacagacgaacggcctggcaggctcaagggcgagggagcggcatgagcagggtgggcgctggttgcaggtgaggggtcccgaggcgggcggagcagggcgttgcaggccacggtgagcacggcagcttttgcccggaaggaggccagagccattgcagattttgagcgggtgtggcgtggtctgacgcgggctatcccaggtgagcatggctgctgtatgggaggtgacgaggggtctgtcctgtgtgcgcgcccgcctggctccgcagtagctctgagaactgccttaagctccggcagcgattccctcaggttagaggcggaaggggaagaaggggcctggagaggtgtggttctcgtggtggcgcggccctcgctgactgtgctcaggatgtcccctcccggggctgcgacctggagccgcgggcaggcagtgaggggctgctgccgagctccgcagcccggggggcgggcctggcgcgtctagctcgcggtcagaggtcgggaagggcgccatgggtgtacgtggggacggcgccgggctgcggctgagccgccagggcctgctgagggcaagcggggcctctcgccttggtggcgcgcaaggtgccttgtgaggagcaatggcggtcccggaaggggaggcggggccgagcctggaagcacagtcagccctctgccggcgaggaactctcagtgcgacccctcaggaagagactgagaacttaaaagctgagggtagaacctgagtgtccaaaaggctaagaggagaacagaagggaatgctggctgaggttacacagcacccatcgtgaccctcgacggcctcagtagctggccgtccccgccctgctgaccgggctcttcccgcgcctgatcactaacggtgggaggcctgggccttctggagaaaagaggctagaatcttccatcttgggttgtgcgggactttattccactgtcagtcacaaagccataaatacatttctccaagacaagaaaagagtaacagcagctaacccttctccggtgcttattttgcacaaggtcctgttctgagtgcttggtttgtactaactcctttaatcttaaagaatgatctggtgaggtgggtcgtattattatcccgattttgcagaggaggaaaccaaagaaggacttggcccaaagacccttgctaacaggtgttgggacattatccaaacgcatgcttctgactttgtcaatctcttaatttcttatttgccacgcggactattgggagggagtttttggaaataacatatacagatacgcacaaaggtcagaaagggaaaataaaaaccggcttaagcccctttcttcccatatccatgtgagcacctgccaggcagctggtgactggcaattttcacttcttattttatgttataatttattgatgtatatgtcatccctcttcctaaggctggagactcatgaggccagagtccatgtgcaatccatttttatattcaccatagtatctaagccagtgcttttaacataataggtgctcagtaaatactaaatcatttctaacgttaaatggatgcatgtggtaaccagctctcacttaagccattccgttctgaaaacaatgagaatgagaacctttaaatatgtgaatcataacacagttacagctgcataatgtttttatggttttcaaaatgcttccgcacagtttatcttgtttcgtcttcctgctaacccttttgagagtgggaggcacgcattacttaattataagaaaatgagaaaactgaaggcagagacaacaaatgagctatccaagatcacaaatgggttttgtttctgtttctgattttgtttttaaaatcagagcggagatcagaaccatcatctcctggtcttcctattttgcaagcagcgcccggtacacacctgttggatacacagcttgaacacaggacctaattgttcgctaggcatgaacaacagggtgttttgactcctgcaagctgctaacagtcttgcacagtgctagactgtgcactagcactatctagaatgtgatcctttgaccggtaggcaggttatcacttaccagtttttggcaagatcaggagcttgtgacagaatgtaaatcagctgtgtctataaacacactgcttagtttgtctttttatttttttttacattttattttgaaataattttaggcttaaagtagaagaatagtgtagagttcccataaaccctttgggaacttcctctaatgttaatatcttgcatgaccataatatagtgattaaaactgagaaactgacatgggtataatacttttaacaaacttcagacttcattttgatcttacgagtttctccacttcagtcctttttttctggtgcagatccaatccaagatcccacatgacatttagtcatcgtgtctcctttgtctcatccaagtggtggtagttctcagtctttccttgtttttttttttttttttttttttttgtttgtttgtttgtttgtttttaatgactttgacacttttgaagaatccgggtcagttatcatgtagaatgtctcttaatctgggtttgtctgatgtttactcatgattagatggagggtatgcatttgttgcatactaaatgcatacttctgaatatcacagaagtgatgttcccttcacaatgtgtcctatcaaagggtaaaggatgttgatgtctttctactggtgctgttaaccttcatcacttggtgaaggtggtgtcttttgagtttcttcactataaagctgctatttccccacttctaataagtatcctgggggagatattttgagactatgcaaatatcatgctttttgtcaagcttttgcccatagttttagcattccctggtacatcttgtttacaacagttattatgtttggctaattatgatttttctattgtcctttttgcctccatatttattaactagacttctcccattaaggaaaaactgtcccttcttccccagttatttatttatttagtcattaatttataccagtatcatgtttatttattttattctatgagtaataatccactactactgttaatttattttcttgctcaaattgttttagctttggccattgggagcgctttctggttggcttctgtgcctcttgacatacccccaacctttctcaagtgttttcttgctttgggaccacaagatattccaggcacatcttttatttccccctcagccctagaatcaactgttactccaaggagtactgattcgttttattggagagtggtagtatgtgaaaaccaagacctgggcactaggtgtgctcattcctatcagcttgtgtttatatggagactctcctgatgaaggaagtagtgtgttgattcacattttggtgctagcttcctatctcatcatatcaggaccagttcgtgactctcccactttgagtctcagtgatctttaagttctgttgtgtcaccgtgtccatgtgactcatctgggggtaatttcaaattctattgaattaaagttatgaatcagtgttatcctttcactcattcattaagtcaatatgtcttgcatgtacactgtgtgttgggccttgtgataggcactgggtttacattagtgagtaaaattctgcctttaacaagtttatactatagtttctttgatggcgtctaggagacattactccttttcttggttctgtatattatcagaactcatctcagattgttcagcattctaaaatcatgtaagttcagcctagggaattttaaattttgattttagattcagaggttgttggaatatgaagataccattccctgtcccagtagctcctggggccattaaaaacctttgcccatgccttgtttctgatacatagatggttgacttcttcagatgcaaggaggctgaagatatatactttgacttgataagacctctgaagtcttagctgctccctctaaccaatactctctggtcagtgcttccctctcctatggggttggggtataggggaggcatcctcctcttcaaaccactctcagaccccaaaaggatcccttcagcaaagattctcttgcttgactttcctccacctacaagtcaagttggatctgggttcagcttcaagggggtcgaaagtgaggtcagttaaggtcatttggatgggcatgatccttactcccaggtccacccttcccacttgatttaatacaatctggcattattccaacacttctccctttggctgtttattagcatttcctttaactttttgagcataaatggaataagaatcactttcacggcccagaaaggtgtctccagcaaggagtgttctgctggacgatgcagccttttcaaacgagtcagttagctggaagtgtcccgtgtctccttttcttttggaaaagatgggagtgctgaaaactcatgctgaggctggttctctgtttctattggttcctttctggcatgtgttaaattatgtcttttgtgttctgaacaaatatgtgttctcagcatgcaaaatatgcacacaatggctgaccgattgcctgttcttgagaggaagggaacactcaagctgtggtgagttgattgccaggcactctgtggtcaaaaatgtgagggcaccatgggtcacctgcatgtgccttgaaaagtaatgtagggtctaggcacctgagcatctgttcgtcaggtgtgccgaagatactgccagagatgggctcctgtatgcaggctcctcaacagcctggagcgttcgccccagctttgagcctggtgtagggccaggggccagattgtggaaatgagtctttagtgcctccctccatttttatgttggtgtttttcacaaaaattttctgtgtgtgtgtgtgtattttaatatatgaaatccggtttagagaacagcctcgtatgtcccatcctgcttgtaatgcagtgatctgcccttgagaattttaaattagctgacctacatagcttaactatttcaattaaaagtaacaggcagtatagattggcaagaggtggaggagagggaggggaagatccctcccaggagctttggttcagacaaaacaatagaagtgacgagcgattctgggaagaaggcatgactgatagttgtcatggaagctctgacaccctttccatgggtgaggttctcacaaaggtggcttctggatatccgcctgctatgaacacatagcctttgtgggatggtgccaagcaaactctcttcaagggaaggattcaggcagcattattccttgctcttctgcacatccgctcttccatttccagtgtctctatacgtggctctctgagggccagtgttctcccagccccttcggcctgctcccgggggaatacctggagagtaaacactgtctgtggtacaggggggccattcttcctccctttccatttcttctctactgttcagaattctgattccacagaaatgcctaattaactcagttgctctgcaatgacaagctaacatctggagctaccaagtcaggaaagccattcagccggggtccaacacagattttctcccctctgcacccagctcagctgctgggcactgcaccaaccctgatgtggcaggacgaggatgccaagggctggagcaacccaaggctaattttttttcacccagaaaatcatgggttagatatttttaaattgctggcttattttgcagcatttttattatttctggtagatgaggagatcttgccatcactaggggtccatctctcccacatgctgccttgcagtgcttctctacgtagaccatctctgggtgatgccggtttacccagggatgggatggggtgcagtgtattacgcttcaggttgtatttgtggcccccttgggaatcagttgcaaagcagggccgtgtctgatgtgatggccaggacaaaggtctgaatgactaacaaagaagctgtctctggcaggcaggtaggagcagtccggtgcaccagagctgtggaatgactcccaggttccatttttcacttccactttgcatccatcctcccatctgcctgcccactgtgtacagtgcttactacatgccttacctagtctaagtgctttacataaatgaattcatttgacgttcacaggacatcacagataggcattaccattgtccctgttttataaatgagaatactgaatcattgaaaggttaataattttgcttatggacatttgcttctggagctggaccaggcagtttggcttcagagtccacttggctctatcaaagtcttgctatcaattacataagttccattccatctcagcccgaagtgttttcagagccggagacctcacagtgtctctcaggacagtacctttcaggtttgaatgtgcccaagagccatctggggatcctggtaaaatgcacatcctgattcagcaggttcgggttggggcctgagaatctcaggtccagcaagctcccaggtaatgtcagtgtgactgattgctggtccacacattgagcagcagtgctgtagtagactactatcatgcctgtgtactaatttcactgtcagattggagttaactgcatttggatagggagctctttcagcaatagaataataccagtaagaatttttaatgagtgatcaactatagtagcagttagtaatcaattttttgtttaaaaactaagtttcctaggactctaatggaaaatggaaaggttatgtccccctttttcgtatctttgccaagggtctttcctttgttgctgggtttaacttggcacttctaggctactttagtcctaacttttctcagttaccattatatgcagttctcccagccacaccccagcagtgtgcaagggatcagacacaaggttgaatccatcacaaaagcagaatcaccatggcaactgcatcctttgattcttgagtgtgcccagcaacctgagcagaggcgatagttgaagtgaaccaagttctcctgagaaatggaggggagtggtgccgggcccacactaggctgtggtatcttcctccctacagtgaggggcttctgtttactctgaagactccagacactcaaaatctcctcccctccctccagtcctgcagttagcctccaggggtttctggtcctaaacttccaccaccatgagattactacaatgccttgtgatactcttgttcttctggtttgagttttggtagataagcacatctgagtcttgctgtgttaatgtgtctgtattttggtgtatctgcttgcttgtcgtgtggggcatatgccaagtccagtagtggatgggctggggaagaccagaccttatcacatggtgcccttggggggaaatcttaattccaatgtgtgaaaccagtgaaagtatgattttctgggtcaattttaaaaatatacgttcaagcaaaaagcaacctgttatctcttctctttctgcctctgcacacagcagcctccattgcctagggtatgatagtgtgggttcactttgtccatctcatttggatgacatcagcgaagatgcattctgtatctctccactgaggcctgtgacaggacctaatgttttgtggagctgagagaaaataaaccaaaatgacccaatggaatataaatgctgatttctgttcctgttgtttgacagaaaggaagtaatgaactaagatgcagtagcctggccacgtgatgtcttgacaggcagctttcagatttggagatgcttcagagtgttgtattgagtctctgggaagaccctaagcactcaattcctagtggtcaatggttggcctgttttgagacataaccagttggaaggaaggatgggcctttctgctccctatgatgttgccttaaaaagacatttcctgggaagaactgggcagatggtggctttaatctcactagccttgttcttcatttttatatccaagcttcaaaaaaccagcattagccaacagcactgtttttactgctaagcaaaacttcaggaaagagcatccttcgatagaacattaattaacaaatgtgccgtcagtccaaatgaagacctgtgctgctccctctgccctccctagctccacctttatttacgtacccaaaacatttccagtggtatcaaggcgacaatgataggttttagtattgaagacctaacattaataaatgcagttttgattgctgttcctatctgtatgttctttaaggaggtttgtttaaaagccaaacaatcccacgggtggcagagactctttgttctagccttcgtcgtcaaaacagacagaatcaggtttgggagcaaggcttctacacaggagcctggaaaactattatgcagaagaagcattttttgttcccctgagtaaccaatatagttagtaggcatgatatgtgtataaactgggatgtatctcctgtgatggagtgacgaggtaactaggtgactttggcatgaccttcccacggaaataacggtgctggaccatatatagacaaagataagctttcacttaatatagaaagaactgaagtgtggccaaaaactgtctcctcacccttgccttcaatgtgatttctgagctgcagactcggaagtttctcacattccttgagatagtggtgaacagtaaaaggtttgggaattggggaactgctataggaactccaccaaaatcatgttgaatcttacagagaaatgggatgagtctgtcagtctgactttcttgtgaatgagaatggtcaggtagctctgacaggcctcaaagaaataggctttggaactgacctaccaagtgccctctgagaagaggactagccattctctgggagcagagggaacctggatgatgtggttctttgtccaaggagagtgtcctggaaaggtgttccccatctaggtattttctctgagaagcagaggatgagggctgaacttgcaggaagccgagaggaggaagtaaagtcaggagaaaatctgcctggttaaggctgaaatttggggactcatgatccagagaggttctgtaatgcctaaccctggttttggaggccagggattttcattttgactggcttcactccttggcttattaaatgtctttgactgagtggctaaaccaccctaagccttagtttccttacctgtaaagtgggaataacacttgtttcagaaggtggttaagaggattacatgacataacacatatgaaccatttagctagcgtcatgcctgtcacatggtagctcgtgaaattttagcagctatttttactcctagttttactacaataacctgactgggaaagcgtccgtgggcagggcaaaagggaggagccgtgaagataatcaggaggtcagcgttagagtgggtaccaaaacagccagagaactgtttgggagaagttgcctccagagcactccggtttggtcccctccatcagggcccactggtcatcgggtaccgtgtcagtcacctgaatgacggtgagggctgggccaataccagctctcccaggcggtgaggctttccttccacacacacaggcttcatctcgtaaggctcttggtgggagacacagctggggcactgctggaggaagggtcagctgcacagacctcgcggccctctgcccagtccctgacgtcaaaagggccgttcattcccagggctgctctctccacccagctgctgggtctcagctcttttcctgggaagcccggcgcttcccgggtaggagattctatcccgacagtctgttctagctcccttccctgtttgtgactgtccctcttccctcccactcgcctcccacgctgtcccccacccctgcctggtttccaattttagcggtgttaccagggcaggttttcaggaagcctgctccagtggctctctcctgggccatttccacagaggctgtgtgcccggctaccattccctaaggctcagccattgcgcccatctgttccccgggctgcagccagcgagcatctgcggggggcggtgaaggctgaggatgcccagacaaggggcagggagggctggcccacgtgatggccaggggagtgggatgcccaagggaaatgtcataaagggtccactggttgggaaaaaatggaaaatggaaataaggttaaaattgaaatgtttttaaaaagtgatttgtgaagacttaaacaaatttctttcaaactgctttattactcatagaaattgtatcaatcaacagtgatcgctaaattgctggatcagtcagaaaatattgttgctgctgaagaatcaatgctaattggatcattagggcattattacatgaaacacaaatagctcaggatggtcgctctttgcttggcttgatctgtagtcttcagagaagcagagaaacctcgattgtttcctgctcagctgacatgcagtttcccctcccttgctccccttcttgctggagttaaaggtggatgctggttgcagacatttccccctatttagaaaaacaaagacgtaccatggtccttgaaatcagtgatattgaacagtcctaaaaagtagagaggttaaaaagggatttggattgcattttagcaatcttctgttggggtctgtgatgtgtgaagacacatctgcacctttactgaggcaggtagaatccaacaaaagccactgatagggctccaggcatggggcagggcctgcactgagggttatggtgacagcggcctgagccacaagctggctggaaggactcctggaggggtgagacatttcataagatctgggaggccagcgtcagcgttgggcacaccatcccccagagtgcctgatattggtgaccttgctgcatggcggatgctaatgggtattgactgaagggacaaggtgccttctccacccatgcttggtcattagcacatggttaggtgggcacgcgtggcctcctcttccacctctcttttggccattttccttgccctctcccccaccccctgacctctggcagcccagagctcccctcagcagtgctcacccaactccctcagggcctgaatttccagggtgagagtcccctctctacaccgtctcagtgggtgcttctgccagggtgggatctcgccagggattatgcttgcatcttaacaggaatttactggggatggaagtattaacccaaatggagttaccacagaggggatttcacatgtttctcaaataatgccagagtgagccaaggtttacataaccagtacgaggtgaggggggtgggaagagggcaagcatttccttgcgaggctcctggcagctttatttctgacttgcgagtggttcaagaagcctccatcctcccacgcatggagaagaccagcattgactgcagccccgctatgtccccgcgctggcctggctgtgtattgtcacatagatgatgtcatggcagccttagagaaattctctgaggcaaatcatattgtccccatttttaaagatgagaaaccagaagccaaggatcctgtaatttgcccaaggtcacgtgaaagagctggagttcaagtcatcccaattccagatctttttatcatgccatgttttttatgcctccccccttgtcccagagtgtggcaagcagaggagagcacgcgtgtgggatgggatcaattgcaaaacgtgtgcagcctggccaagcaggtgggggagtggcaggaccagctatgtgtattctcatgctcaagttcctctgggtcttccgaagacagatggggcaggtagttccagctgctttgtgccttcaccagctgagcactggcaggtggggcatttttaacctcacgccttgactatcccctctccctgtcacagtcagctctgcctattgtcctccgtggctcagaagcagctatccttaatcattcatgggggaattttgtggaaagatccctcccaatgtggctgcatctgccataaagtggagattttttgttatgtttgatcccctgctgtattcccagagaactcagtgtgcctggcacgcagtgggtccgcagtaaatttttgaatgaatgagttcgcaaggcgtttctcctggttcttgcccatcagaatttccatttctcctgctccctgggctggcactaccatgcatggtgcccttgtccctgccatcgccatcatcattcaagctccctgctccatcttgcagcctcatttcttagctgtaaagtcttcccagtcctccattgtccttgtgccctctgcatagcccctcctcccagtcaggccgcatcctccgacctggcctcccacctccacgctcagttttcccagccatactttgctcttgctacattcctgccaccctatctcctgggagtctctttgtccttcaggtcagacaatgcaaacttaaatcttgctgaaataagcaagaaaggtacacaggtgcaggaggagtcttcactttcccgcagaaacatactcacttccattgctacacagagacagcaatgcaaggataatgaaaactagctactgacacttggcctccgtgctggaggaacaatgggggaccagggtaactgtgatgaactgaaatgacaggtgtttcctaaaggtggcggccacagcagacggtcatcactgaggaagtctgtgcccgctgttatgagctcttctgacttttcaaggcaaaaatttggattttgtatgaaacctactgtttcttaaatgatgactcaaaaaaatttattcttaatcaactatgtcagtggcctgttggcctctacttcagggagtcttcctagattattgaggcccaaccggattctttacttcctacctgctcctagttagtgaagcatcgtcatggagaggacagacctctggccaaagaacctaaagacttgggccctggtcccgggtctgcttccagcctcagtttccttgtttgtaaatgagagcaataatatttggcttgtccaataatctaccatggtacagctgtgtggcttgtagtttcaaagtgctttcatatgcgtgatttcatttgatcctcaaaagaaccctgtgtggttagcaggggcaagtgtggttattcttaatttaagaggaaagaactgagggtctgagaggtgaagtgacttacccacgatcatagggtttataattggtagagctggctgtgtcatttgggtcttttatctgctgtgtggtttggtgttttgtttgaacttttggatagaatgagatctgtctttgtaagctgttaagtgctatgtgggtgcataagaaggagtaaggagcttacttatatgggttattactaataagtgtatgccctccatttcctcatagtgtggcactcatccatacaccatggtaattgagctctgacgatttgatatgtcatgatcttacctctctaaccaggttgtgtgtgagtacctggaagcagggatgaagtctagtgcagagaggcccatagaatcatttggtaagtaattgctgatgaattgaatcataggaaagtggagatgccacctgagagagaaccataacttgaaaccaaagctgggctgtgcctgaggttagtcaggggcctggtggctcatagtcctaaaccctcagctcatggtctgctggtagccactgatcaaacatgcatgatagcacgtgtgactgctgccatcagtgcgatcaccatccaagaagaccacatggggggatgatgagaaggtatgaaatgacatagtggaaatggcattttggagtcagatctgggtttgactaatccctggctgtggggcaacttaactctgttgagccttagtttctttacctatataatgggataatagtagctacctcatgagtctgtccctggaacaggccaggtgctcaagtgcaatgtgtagtccagttataaattgctttgttagagcagtactcacaagggcactgtttatctggttttgccaatgctgggcactgaattcctcgctgcaattgtcagatgaggttcagtcaatacaaatattcctttataacagtactggtaggagccttttaacttgaggttttattaagataataaagacaactggagaatgactaggtgcacataagggaaatggtgctgttttcaattaaacttcaggccaactatgtacaactatggatatagaactgagttatgatgtggaattccagtttctctccactgaggacctgggtgaactgttaccagagagaagcatctctggagagctcccttaagcatcctgcccactctgtggggccatcccctgctgctcttggctcagattcatctatctgtttcagggcctttgccctcctgagtctgtagttagccacttgctccaagagtctttcagctacagccttcattaatttcattgtgaaggggccttcggctcccctagcatgcgttgtgggacgtcagctgcctgctgtgctcattaccactagcccaggaatgcggtgttgactcatggctgcagctccgcttttgaacagaagcactcagggcctgagcctgtatttatcactaggcagggaaggtcctaagggaaggtgccaggtgaacacagacctcatccttccatcattacctatgcaaaacactaaatacagtcatctcctccggaaactgccccccaggtcccagcagtagttcaggattcccctgttaaccatgttgtgcccactacctttcaggctgcacacacttccctctgtgtttagagagaagggaatgcagaagtctgccgtgtagggcatgaggggtgaagccacaggtcagtcctataagcacctcctccttcctagagcagagccatcacctgctttgggctgtgccaaggctcttgttgagcagttcagtgcctcacgtggactccccctgcaagaattcactgaggattattggttaatgctgataaagcacttgggctgtaaatatcaagtttaatgttaataaacagggggattaggttcatttatgtaaaagggaatgcttcacaatggatactgggcaggggaagactttacttttatcaacaaaaaacaaacagagtaaactgtaaacccagacccatcgaagccaaggccttcttgtctgctcaccctgacattcccacagggtttttctctggggctgtaaatgcaattctgctgctgaactgattgcctgaacgtacttgtgtgcttgatgtctttcaaaaagaaagtgtctaggaaagtgcaaaagaggagcaggcaagacagaaacagcatggccatgtggaggggccgcgctgatcgtgagagcaaagggaattgtattattctttgggatttgcatactttaagaaggtggttcaattaatggcattctgttcctcctagttgaagacagcaaaatggaagcataaggatttgctgagtcctccctccaggaagcttcttagctgagccattctcagctccattctccattgagaacccttcagcacatgcatgcttgcttagccacccgggtttaaattttcattgactgaacagtaaaggggagaagcaaacacacatgagatctctgagcagtgtgtttcaggtgctttataataaacctctccttgccgggagagtgtcatcccatttcacagaccaggcaactgaggctcagagcgggtggtctagaatgtgcccatgcttgggctcctttccttgttcctcccaaaggcagcagttatactatttcctttgtgtaaaaatatttatctttatgaccccagaacacctagtacagatccatagccatttctctgtaattctgaaatccccaagtctctgaaaagtgaaagttcatttattatccctttgacagcaaaatctggcctttcctgaattcatctggggcagagttgtcctaaactgacacaagggtagttgcagtcttatttaacctgcttagagtgaatattcatatgatttactgcagaaatacgttggcttctggggcccttcaccctgctgtgctattacatacagtagatatgcaaatgactttacctgacacattctgaattctgaaatgcatttggccccaagggtttccaataagggaccgtggagctctagaaggccctgcacacagtgagcactacctgcatgttgttgcttagttggagtgaaacctcagtaccctaactttgtgcgtggtacacccatggtgggatggacatagaaccaggccccctgttcagagtcaccacaaagcacctgccgttagggtggcaggaggaagggcaagcaaacagagcaagagaagatggtgccggcagcaaacagcacagggcatggcgtggggacagttaaggtgaacagtgcccacagtcagtgctgtggcaggacaactgcagtggggcaggctcggcagagctgggcaggggatgcagatgctggagaccttgctgcccagcagatgagagtggacccaattctgtagatcgggggccgaggctgaattctgagcaggaaagtaatctgctgaataggaggctgtagtaaggccttttagatggtggctcccggagtgaacaggatcctgaatctcaggctttccttatcccactgagccatgcctccctgcctgaaacgtgtttctgagtaatagcagctaacacttacacagtgcttcctgtgtaataggcactcctgtaactgctggacccatgacgactctgtgcaattcataccgttgttgtcccctttgtatagatgagaaaactgaggcacaccgagggtaggtcgtcaggtcccgtgagtcgcgagtgtgggggctgtggtgagaacccagccagcatggtgtgtgtgtgctcttaactgctacgctctgtcctaacctgttcttttataggtcccagcaaggaagcttttctcctggtccacaccgctgcctgggcatggagaaacctgctggcacattggccaaggttgggggtgaggggtgatgtcatgacccatccaagaactgtaatctcctgtcttcaaggaggccagttccctgggctgacgcttcatgcatagcggctgcatccctgtctccccacttctccatccccttccaggccgttcttcccccatgcacacacatgcctacacatgcctgcaataactccccgataggtagaattaaaattttgaaaaacttaagctaagactataaagtaagaaaggctaaatcagcttccttccttcttccctttgactcctgcaaatctgtagcttccttcaattcattctggaatttttttccagttttcaccctgattatcctttattcttgtcttaaaaataggcaggacattttctttgggcagcggggatggcctgttataaccttgctctctctatatggtcacagtgcattgcatggaagttgggagcaccctcgccttttcctgtgaggtcactctttgatttcctgcaccctctctgccctgtcaatgccgcagggtctgtttttcctataagtctgatgctctcttgtccttgaactccttttccgggtgggttttaattagctaaatttgcatgtgacaaaatgagatataaccttcgtggggaaattcctcacagctttctaggctgggagaaatcgaccatgccattttgtgatggagtgtcccagtttaacacggcaatgtgactgcagacttcatccgcctggtgggcactttgtccccatggctgagtttcaggcttcctgaccttcctggtgggcagccacggcgaaatctagacttcctggtccctcctcagttccctatggacgatggcaagattttgcaaagggacaaaaggaaacttttgctgaaaccttctaggtctttaatcacttgttctttttccttctaaaattctggattcttgccgagcctctttgtgcttcctcttttcattctctgtcacctccacttagtctcgttctcacctgctcctttctctttattctccaagggaggggaagacaacttgaattttaggaacaaagcaagaaacagtacatggaaaggagaaaaggtgctgtggccactgcagaggggggacaggtggctgagaacctttgtaagccagaaagaactcttctctcccattctcaaatataattagttatttctaaaattgagctgaatcgtgggcatctttttccactcaaactttttttaacttaaaattaagttctatgtatatatgtgtgtgtgtgttcattggagaaacagtaacaccacacacaacttagctaacctaggaaggtttggctcaaatgtccattgcaaagtaattaagaatctcctctcctatgctgtgtttacactgtacattcccataatgtccacttcctggctgctggactctgctctataaatataaccagtgagcagtgtctctttcatgctcagctcctgaccagttaaggggaggaggagatgagtccaggaaccagagttggatgctgggaatctccgtgctgtccttccagggaacatttctctgcaccgggccaaggacccacgggatcatccctttccattgtgaaggaaccgaggccgcctcactgggctccattttccagtatttttagttagcagcctgcaagtgagtgttctgcctgcagtgctgtagaaactggcagatgctctgtgttgagtggtgtgcaggacagacaggagtcggtgctggagaggcgatggctgcaactggggcagagaagtgagccttcctgtcttcctgggggtgatcatccccaaggcagtgcatcacgctcccgtgttcaaagccgcagtggtataaactctcgaagagaacagtgtctacctttactctggaaagaagtaaccgaaagacaggagcggatgttgcctcctggcaagagggcctcacggtgtggaggggcaatgccaaccttggcggtgacggacttaggttctattatggctctaatacttgctgactctgggaccttgagcaagttatggtaaccctcagcctctgtttctccctctgtacaatgagcatcacgatagtcctgttctcacagagctgctatgaaggttgcatctgggaagcacctggcaccgtgcctggcgtaaaataggccctcaggaaatgttggctattattatggccatgcttgactggcacctcagtttgatgtagtggttgtcacgtttcatttctagcgttctgaataggctgtcagtagagaggtaaggaggtaaggactctggggccagactgcctttcttcaaatcccaagcctgccacttaacagctctctgacattgagcaagttaattcatgtgactgggcctcacttttctcatctgtaaagtgagtatgaagtgacgtatacttcactgggtcatggtgaggggaagtatgcaaagcaggagttggtgaactggcgaacaggccacatccggcctgccatctgcttttgtaaataaaatggtatcagaacatagccacacgtatccatttatgtcttgtctgtgactgtttctctgcagcagcagcagagatgagtaattgtgacagagactgtctgtcctacaaatcctaaaataaaatcctaaaatatttactacctgaccctttacagaaaaagtttgttgccctctgattgtaaaaggtttaaacagtgtgtggcacagagcagatgccaggtaaatgtttgctgttattcctgctggtactcctctgcagttcgtcacccccaaccctcacattagctctgtgaagtgggcacacagaggtgatgattgttccctgtttattgcacctgggattcaggggactcacgtgacctgtccaaggtgaggccaggcctaaaatctagtctagggctcactcggccggtggctccgaatcagtgacatctgccttgccttctctcttttttttttttttttgagatggagtctcactctgttgcccaggctggagtgcagtggcgcgatcctggctcattgcaagcgccgcctcccaggttcacgcgattctcctgcctcaagctccgcctcccgggttcacaccattctcctgcctcagtctctcgagtagctgagactacaggcgcccgccaccacgcctggctaattttttgtattttcagtggagacggggtttcaccgtgttagccaggatggtctcgatctcctgacctcgtgatccacctgcctcggcctcccagagtgctgggattacaggcgtgagccactgcacccggcctgccttgccttctctttagattcctcaaggacaaggatgcatcagtccatctccctgaggcatggacagtgcctcacagagcccacccagtcagtatctgcggagttcatttgtcttctgtgctccacctggccagcatcagcactgagcactccaggaagagacatttccaaccctgggccgttcacctcccagcacctggagttgggagcactcagcttattaacagggcagaaactcccaggttgcacgcacagcaccgaatcctgaagggcacaggccaagaccctctctccatcccgagacctttagtcaggattgtgggtgtggttgatgacagctgatatctgggtagcaatttatggttcactgaacacttttacatccatgatctcatttgatcttcatagcaactactcagggggacaaactgggtgatggcctacgctgtagctgaagtggagagagactggcacctcctccaaggccatgcgttaaatacccactgagccaatggagccctggtcatccatctctaatccagtgacctcccaaccccagccggccctcctgacttgatcattgtggtgatgccagtgctgtagccttgggcactcattccattgtctaatgaccctcactgtccaataattcttttttgtctgtaatggaaattccacatgctttaggggtttgttctgctctcagtggagatgacgacaagccacccagaataatagctctactttttagtcttcagccttgaagctgtcctctccctaaccagcccaggctggctcttctgtccttgtgggtttgctggaacacagaccatcccatccaccctggtgacttctaccacatcctgcacttagagcaacttccagcatgacgcagaaggagggacagtgtgttctgcgttggctcagcccgtctgcagaacagtcatgtcactttggaagagcctgagtttgagagggatgtgtgtctgctcatatgaatacttcttgatcatttagtttctgtcatcagtatctggggagtggagaatcgttgctgagggcttctgaagagcaggggagaaaatagatcacgttgacagtcagcataaggtcatgggggtgaagggcaaagggaagctgagttgctgctggacagtgtggtctactgacatgtctcctgggatcgtgaccatcatgagggcaggcggtcaatggctggtcagagctatacccagctttctagtacagtgatcctaaaggacatggctgaagcgtgttgaaatcctcctttgtaatgaaaattctcccctgcaaggggagaagtagcttctatgaaatttccagcagaggtttccaagccagggaggttgaggtaggtcagggaggccgcaggtgcttatctaagtggcactgccacagtctttgagtttccattactggcctcctggattcagtggagtcctgctagacgttgtcattgcagggcaaccaaacccagccccgggcccatgggaatgaacatacatatcttctaatggttagagaaataaattgctttataaccaaaatacccttttggttatgtgtctctcttggaaaaataatcagaaacagctgccctgcagttctccagagaatggagtcttcctagtttccatgaagcgaaaatgtttcggaaatcagaactgaatgaggctggggcgagaggtggggctgaggatggactcctggcacctcctctgattgatcctaaatcactttctcactctggccttcggtttctgcatctgttaagagggctaatgaaacctgtttcttactgcaacttgacaccatgaaaatttagtctctcatctgcagcaggcttaggcaaagtggctggccacataaaacagcttgaatccttgagcatggtggatggagtttgtttaatgagtgaagctgtgtagcccactccatgtctgtcctaccattaaaatttttattgttatttgtgaagtatccactggagttcagaaaaagactgcacaccactaaatcaagttggctcagctcctgctgcggttaaaatgagtgctgtaaccccaattaataacgatttttttccaccagagatggctgcttggatgaatgtattatttgctgggggctcttgtggggcttgcttgaagtgtgtaaatagtccgcctgaaaaagaaagtccaaaaaagggctggtttagacagagtggcctctgcaatctggccacagtcaaaggcttcttcacatcagcagctctgatacgatacacaaacgtttgggttgtaggacagtgtagaaagaggaccctctgggaggccaacgtgctgagtggaaggtggaaggacatggaaagcagcaaccgtgcagctgaggctaagaagccccggagcaggcttgggggcttcttgtgtgagtcatcatttgtcctccactgtctatcaagaagcagggacaagagttatgcactttaaatgtcaaggttgcctttgtaggtggtagaggcctggtgggttccaggagattattcaggttctatgtagagcaaattccagatcagatgaaggtgtttgtgcggggacagctgtatgttttctgttacagacctgttaggtcaaaccccttctttcttttttctaagctcttactcttccccagtttttacttcccaagactttcttgggtccttccaagtcctccttagaggatggcactttgctgggtccatgggtttaactttttttttttttttcagtctttcccatacattcgagttagcttgaaagtgttgatggccctctcccgcaaaaggaatatcatttactccctaccccttgtgttacatgggcaggggaaggagggagtttctagctcatgttcccggaagggaaggtatggcaggaacacatcccacttttccctgtctctttatgcccttgtccccaggggagaagtgacctatctgactggtgagtttggtgtagccccttctgggactctcttttgaatccacttatccccaaagaagggttcaccaagttattgggactgatctggccctgtggggaaaacctgtgatggtctcaccttctggcagggtaagtacatttaatagtggttgaaatattaggaagtccttcgaagcccgtctaagccacttcctccattttataatttgtttctaatcaagcttttggtttgatttaatctgtgtgtcctatatcttacttcttaattggttctgagtttataaggggcagaaaggatgattatttattggctgccacccaaaggcttagaactcctccttggtcattgactgatccatgtggaaggctctccaagcagctctgggtacagtggaggccaaacatatgtgcatacttttccccaccagggtactatttgcaagtcattggaacctaagtccgtggcttctgttttctaagaacatctgctgtggaaatgctattcttttcctctttcttcatccctgaaataatgataccttcctcgcaggagggtgttgaggattaaataaaatcaagcacattcacacacgtaggtagtcagtaaatgtcagtttctgcctctccgtccatccactggtaacctacattgtttaagtagcgcttaccactattcattctgatgtccaaagtatgcctctcatgttgcaatggaagatttcttctatctcattgggagcacttaataacctttaatacatgatgtgaaaaccttctgtctcacatgcctgatttatgggatcactggagagagaaaactttgaaaccaacagggaagtaagggatgcgtactgagtgggagaagcaacagtactgggatccaggggagggctggatgggaagggctcagtcatggataggactgagggtgtgctggtgagcctggaagccatcactgggtgaccaacctcacctgggcacttcttagtttggatgtgccttatttaaagtaaaacttgacacagtccagaaaaactcgcaatgcaaaaacaactcacttttctggagctttactgtgtgtgcccagcactgtgctcaccactcgagagcccctaggcaggcaccctccctccagttgttctcagggagtggggtggagagtatcagtacagaggagagcctcaaacgaccccagactctgtctgtcagtatgcttctggaggatgtaggctgagtcttatcttctcaaccgccagttgtctgtagtggcccttccatttcatgtcttccttagacacatactccagtctgttgttttgagtgttggctgtgaactctgtaaccctgtattttctgttttcctcttagtatgagaacgaaggtgtgggcccggattgccccattactcttgtgtcctgtgcaccttttgtatcgtgctgcggcaaactggcacaggggatgtcagctccgcaccctctgctgtggattgtccagggtccaggcttccccttcctactgctcacccctgtcccctttgctgttaacacctgcccgtgggataagggaaaagaaaaaagccactcaaactactccattgtgagatttgctatggagtcagggctgaagtggggttggttgacttgcagaatctgtgaatgggggacgatatatgttgagaaagtgcctgggtgattctgatacgtcccatctacactttgagaactacaggttcattaccactgccaagaaaaagatcttttcatatccccccgtcctctcttcacttggatggcagttgagtctctgaaagagattcatcccgaaggtcttttaagtgaagagaggcaaagcttagcttagtatttcctttctgaagagcacatacccctgtgtaaaattgaggagcaacagccttaaatggaagcagctgtgattccccgcccctgtgaaggggctgtggccctgcagatgccacggctgtggatgcgtagagcttgggtaccctccctggcttcatggctgacctgctgtgtgaccttgggcaagtcagatttcctctctgtttgccatctgcaaaatatggatacagacccgtgctccctcctggttttactgaggtactgtgagagccagtgaaatcacggttatgggatgctcagcattctgctgcagaaaaaaaaaaaaaaaaaacctagttactaggaaagcaccattccccaggtgtgggagttctcagtacctgtgtggagtttgctaacagacctggggtcattcggggtgtgacaggcaggccctctctcctagatccaggtccatttactaatgtccttgcccatccatgcctgcaagaaggaagagatgtctgaactgccaggaggtggtggctacagatggtccctggcacagcaagaaggcagtgccaatcaaaggaggtcggcctcttcaattagaactctgagcagatggggctgaggcagccagaaggggcacttcccagtttactaagtgtgtgacagtaagctggtggccttcagaagaccaggagggtcacctggttcatttcctttctggaaggaagggcagtgtttaggataagtcagatgagattcctcctcattggacagataataagctttattgtgagttaagcaatatgcttggccctacggatatcacattaaacaaaatagacctgaccctgaccttactagtttacaatcacacgatcctgaccttactagtttacaatcacaggatcctgacctgactagtttacaatcacacgaccctgacctgactagtttacaatcacacgaccctgaccttactagtttacaaccacacgaccctgacctgactagtttacaatcacacgaccctgacctgactagtttacaatcacacgaccctgacctgactagtttacaatcacacgatcctgacctgactactttacaatcacacgatcctgaccttactagtttacaatcacacctcctgtttcttgccacttgcacacaactcagggatggggtaggaggaggaatatcataaatgcaaattcctgtgccttacactggagctactagatcagactacctggaggctaagcccaggaatctacatttttaacaagcttcatagttcagccttgcacatattaaattttgagaactggttacttctccatcaatgcatggggtaatcagtcaccttgggcacattggtgtcttaaaaatgacttaaacacataattggaactgttttgctaagtctagcctgtgtctacgttgctagaaaagccctttttccccttattctgatggtatagaagaaaacaactgcttaaatcaaatgaattaatgtgttgattgagctttcattacctgtctagcttcatgctgtttggaaaataaatataaaagctataatcctggcccctgatgagcgtacagggttcttgagttgataaaacacaccagttaaccagttagagatgacgagaagatggtgcaagattaagagccaggacgtaaagcagatggcgcgtttccaggggtagagaaatgaggacatcggcaggtcagcattgcagccacatcctttctagccatcctcagattccagcctaatgatcagttgtaaactcctaaagaacttaaaaaaaatcctggaaaaattcaggagattcagggtgtagtataggaatctgtttgattaaaacactccacaggtgattctgatgggtgtttccaggtttggaaaccagcatgctaccttttaaaatagtaaatggattagttatctcttttttagagggggcatgagaacaacagttcctttatccattcttctattacaccagatatgttacagttgcactcaaaaatcgtggtgactcaacacaacagaatgtaaacccaatcaggacgggggtggctctgctccatattgtaggggaccagggctttgctgtcttcgttggtggctttccaggcctccctgggtgttaacatccagcactcagacagtcacagaggaatgaacacagttgtttgtaatggcggccaagatcgtccaggcccggaagttgtgactatcactttcactgacatttcactggccagaagtcagccatgggccacacctgtctccaaaggaggttgagaaatgtagtccagctgagtaccctggaggacgggaccaggctgtggtgggacagttcagtcttctctagcacagcggtctccaacctttttggcaccaggaatcagtttcgtggaagacaatttttccatggaggaccgagaggggatggttttgggatgaaattgttccacttcagatcatcaggcattagattctcatcaggagcatgcaacctagatccccagcatgcacagttcacaatagggtttgctcccatgagaatctaatgctgctgctgatctgacaggagctggagctcaggctgtaatgctggcttgcccaccgctcatctcctgctgtgcagcctggttcctaacaggccatggaccggtacctgggggctggggacccccgctctagcgtgttcccttcctctccaagtctttaagcattttcattgatctcttctcctccagattctcccaggttctcaagcagtgaggttccaaactaaggtttaactctctagtcttcagaatgttcttttctaactgttagaactgcaaagacagccttgaaatggtatattctttatacctgttgcctccacttcacttggtcttactgttaggtttaaccttaggaaatcactgatattttttgacctacagaagcggcattttcatacaagtgaatgctacactctcaacttgattgaagagcaccctcaatctgccttcagcacgtgcactcccactctgcagtaggcagaggtttgagaaccaagccaaaggaaagagaagagggaggcagagtttctttgtactacatctcatcacctgctgtgtttggggtctgccctgtcccaccatagtaaagctcatatcccacctcttcctgaaaccttaataatgacatcttatttctggttatttgccagaagctttcacacacatgatctcattcattgctttgaggaattcgcttgtttccgcctctcaatttatgagataatgagagttatgtaataattcccttcttcagtttaactgccaggaaacttaggccagcatttgtgattagtcagaataattttactgtgtgtttttggttggtatatattgttttaaaatatgtattttactcattaatttttgaaaactcattttttcctcaagttttttttttaaatgtgaaattttaaaaatctcaagttcttaaaaaatgatgtgggataaaacaactaaatttaattatatcatcgtctttggaggacggtgttatcttcatcttgcatatgtagaacctgaggtccataaaaaccaattttccgagcccataaggctcctcagtggggtaactgggactgggtttcccaaccagatttaatccagggccccttctgctgtatcaatgctgcccttccagactgtccctttcatcatcactttaatctcttccctctcgatttcagataactcgtattttaagacgcctgaatattttctatcttattattgtagatatgtgagcatcagctccttaaagttaccgaatatttctgatcaaattctggttatttttgtctcattaaaatgaatatttaagttttcaggagagaagaaggcacaaatctcccttaaaaagtaatccatttgagagatggattaataaagtaatattatgaattcaatataaattaacatatgtgttttcaaattccaaaaatagatgagggagatggaattacactagtgagttcagcatgattcctaaccaaggccttttcataagtggaagtctttcacctggccctggggaaatcacggaactcaatatttccttcacttaattgtttttcttttccatttaaggaaaggtagcttaaagcagtggttctcagaatatggccctgaaccagctgcatcaaaatcacctgggaacctactagaagtgccgattctacaaaaaggaagctccccacaccccgccctgccccacacgggacccagcagtttgtgttctaacaagcccaccaggtttttgtgatgtatgctgaagtttgagactggttagcttaaaacagcctctgagaggggctgcaagccactctttatttggatcataactaagtagttaaaacatccctgagtgaattcaaaatgctaatgaggaaaattaatgtctttatcaaaaaaagaaaaaaagaacaaaacaaacctcaggagaccagaagtaagttgcctctttaagaagcagagccgctttgagatgttgcaagggggagctaagagcagggcagaattttccagtgtcttttgacaggaggaagtggttggggacgacttatttttttggcccggagacagcctgtcattattagactaagcattgtatcagatctaagtgtgtagctttcttaatgtaatgcagagcaggagctatacgttttgttttgtttttcattttatcagtaagaatgagtgcattacagcctgggcaatgtagcaagacctggtctctactaaaaaagtaaaataattagccaggcatggtggcacgtgcctttggtcctagctacttgggaggctgaggtgggagaattgcttgagcccaggaggtggaggctgcagtgagctagaactgtacttctgcactccagcctgggtgacagaaagcactagtaatagctttgtgagctaagtcccgctttcttgggtgttctcatggtcatgctcagagaatccccctctccccaccagcatccaccagactgcacactggtgtgcaggagaaaccagcttgcctggcagcctgggtccagcagtcccaaaccatcagaaggaagaccgacatcctgcacctccacatggtcactaattccctgctgtggggggcacattttggcctgacttggctgacacaatctggggaaaaaagagaagtatgggctgagtactgtggctctcactggttaatcccagcactttaggaggcagcagcaggaagattgcttgagcctaggaattagatcagcctgggcaagatggtgggaccttgtctctacaaaaataaaaataattagctggccataatgccacgtgcctgtagtcccagctacctgggaggttgaggtgggaggattgcttgagcccaggagtttgaggttgtagtgagccatgatcatatcactgtgctacagccttggtgacagagaccctgtctctattaaaaaaaaaaaaaaaaaaaagaacaagaagaagaaagagacagaaagaaaagaaagaagagagaaaaggagaggagcacagattgctcaaccccatggaggcaaggctctcacttctgctggtggggccctcggcccgtcctggagtcggggtagcatcatggttgagatcacatggactccttggctaaagtcctgttttgaacacttgttggctgtgtgatcttagattaggcactgtttctctctgcctcaacattcttgctcctaaagtggggttaattatatataccttgcagggctattctgagaattaaatgagttaatgcagaagttctgagcctttttggtctcaggactcctttatattctcaataactactgagaatcccagagagtttttatttgtgtaaattatagctactcatgtttattgtattagaaatcaacttaattcattaaaaaaccgattgtggccaggtggtgtggctcacacctgtaatcccagcactttgagaggccgaggctggcagatcacaaggtcaggagatcgagaccatcctggctaacatggtaaaaccctgtctctactaaaaatacaaaaaaatttagccaggtgtggtggcaagcacctgtagtcccagctactcggaaggctgaggcaggagaatggcgtgaacctgggaggtggagcttgcagtgagccgagatagtgccactgcactccagcctgggtgacagagcgagactccgtctcaaaaaaaaaaacaaaaacaaaaacaaaaaaaactgattgcatgttaacataagcaatattgtttctgaaaaataatttttttgtaaaacaaaaaaacagaagagtgacattgctttacatttgtatagattagtgtctgacttactagaaaacagctgggttctcatatctgctctgtcattcagtgtgttatggtatcacatcatgtaggctctgggaaactctgctgtgtatttgtgagagcattacagtgaaaatgttagagttgttataaaaatagttctctcctcacagatacacgaaaaaggtctcagagatcctgctggggttccttgggacacactttgagaaacactggattaataagtcatgacaagtgtttagtataacaccttgcatatggtaatcactgagtaaaacattattacaaacagcactatttactaggagatatagcatcagaggtggttttctatacatatatgggccaagctctagaagggtccttgtgcaacacacacacacacacaacaggtgcttctgctgttgccaccagcagttccatgccatcccatctggctggggggagccctgaaagtgtctggatgtatctgaagctgctgtgctgggatgtgtgcagtactaatatgggaatgacagtgagtggacattgcatcacatagtagcctttcctcctaggaggcaaagcactcacctccccatcaccctgcagttatcctcatgggggagggagccagtccagtcccttgggaaggcagtgccagggccaggacctgaacctgcctttctgatctacagcagagtcaggctaaagagggcaggcagaggctcgccaaggggcacagtggagtgcttcaggactcacagttgctggggctgaatgctggaaacagcttgtcagttcaacccaggagatgctaagatgcaggctagagtcgatgacttggtcctcccatcaggggcttgcagaccatgtgacagtcagctggcactcccttgacctttctgttgagtccagaaaccatagtgcaagcagtgggctgaaagctgtggcaagctgctgtgttggcatgtaatttggaaagcctattcacttagccacctattaaacacctggtgtgttttgagtccccagtctgttttcttgttcatctcccaccaagggaaaagcaacattgaccaatcaaaaggcaggctcagtcttgtagtctcagtagtacagtcttccctgtggccaagacggtgtcttcagcatctgcagtggtgtgtgcagccataggttgacaatgaaatgcagggagccaggatcaggaatctgacctgcaccaagagctgtgggcagaacagaccagcatctgtgtgatgctgtggctggtggtgcaggaggccaggaggcatccaggagccagagggatgccttgcaggactggggtggggtggaggctgtgtctaaaatatgggatgaatgctaagaatcagaaagttagtgaccgcaggcagaagctcagaaacacacagcagatgtgaaaagtgctccttgcccctgctttttaaatgttatctgaatgcccacagtgggcagaagctactattcagtcaacaaataatggtcaagggctgggcattgttgtaggtgcatcactagttacctcagtgaataaaacagacaattcctacctgcaaggaggttgcacttttgtgggaagaagaaaataaaggaaaggagaacataaaggaaaaaatataaatacgatacataatattagacacagtggagggatgaatgcagggatggagatagggtgcttcagggtggggttatagcttttaatagaggggtcagggaaggtgttactgtgaagataacgtttgagcagaccagtgggaaatggcgaggtaagtgctgtggatctggggagagggcattcaagggagcaggagggccaggtgcagaggccctcaggtgggagtatgcccagcgtgtctgggagcaggagggccaggtgcggaggccctcaggtgggagtatgcccagcgtgtctgggagcaggagggccaggtgcggaggccctcaggtaggagcagggaggaggcaggtatggctggaacacagcaagtgctcagaggtgaggtcagtgaggaacagagggcacttagggtcttgtaagtcattgtgatgactgtggtgctaacttggggtgaagtgtgaagctagtggaggctttttagcaaaggagtgactgatctgttttgaaagagaatcattgctgggagcttctcggtgttggtagaagtgtgacggtcagtcaggaggctggatcagtaatccaagaggcagatgttagcagcttggaccagagtgataaaggtggaggtggagagaagttgctagatccttgatacattctagaagtacaccagaaatgatctgctaacagaccggacatgaggtatgaacaaaggaagagggaagatggactctatatcttggcttgagtgaatggaaggctggagagtcaccatgatccgagatgggcaggagctggttggggtgggggaggctcaagaattggggtttggacatgccaagtttgagatgcccaagtagagactgactgtagaggtctaggctggagcaggcagaaagacccaggatgtgcaaaggaaagagggaaacagcagcagtagcacttgttcagccaagtcctgcctcggagatcaaatgcataaaggaaaggaaatctcagagccagcctctaaccctgagcttaatcccaaagagcagcagagtagcctggggtatccacccctccaccccggtggtgctgcagagcccctgttgcactcacgggtggcaagaggcagggctcaaagcttacctcacaggtgtgactcccagggagtaggggtagggtgaggaccccgctggaactggaatggactctcctgtatagtgatgcctcctaagcctggggatgcctctgcaagggctccagggggctctcaaagaggagcaggctctgcctttctcagatcagccctctggctctgttgttcccttgggcctgtcttcagataaccacagtaatccagggagatgaaattggcagatcagaagcccttgattagacctgcagaatgtctgcactgacaagaactgcagaaagcatcccgttcaactccctcctcttacagatgggggaactgaggtccagggagatgatgggacttgtccaagttagaagcttcatgacctagggcaaatcacttaacccttgcaatcatgccaagttgagagcattttcctaaatgctgtggctcagagatggctgtgtgctcgtggttcctcctgtttctccctaaccctcttccacatgggttttttactgcccgatcagggtttggggaatgattggcagcccggaggccagccagcccttttggcaatccagtcaaatctgcccactggctgatgaaacatggactcccttggcagcgagtacttcctcaagagatatcttgcttaaaattgatggcccccctttggctttgctattccccatgcccttggtggggcagagagttagttccatcccaagttcttctccatttgccagagtccacctccaccccagcccagagctgtttgctctggcttgccctatcctgcgttggctcctttcactctctgcaaacccttctgtccttcccgttgtctgagctgcctttttcttgactacttcttaagcctctggatttctccttaaatatcagctctaggacgcctgcctgatgagctgaggtcattcctaccctcaagtgacctggtgaattaagcaacaataccagggattccaggacagtgagtttgaagatcagcatctttgctggcctgagggaggcccttggcctgctgggggtggatagagtgatgctgaccttctgcacaggctttgggagggaacagttagttaccgcaaatgtctggctatctaggtgaagcactcccgaccctctgctcctcaactgtagttgtgaattacagagctggaaacagcacacgggagcatttgttccactcctgtttcagggacaaaacttaggcctgggtctctaaaaccagaggtgcttgatgcttcatcccaaggctaaaggggcagatgccctctctatctggcgttgtggtttcctctacttccaccttactgcagagtggggggctggaacgttggcaaggatccaggactcctgtaccctatctcattctcctcccacacccctgtcccttcattacagatagtccaacctctttgttctgtggttgctgaatagcatcccccaggggaccatcttccctgcaaatgcagggtgacgctgtgcagtggtttctctgccatcatcttttctctgctggggatgccagagcataaacccatggtgcaatggaatgtgcctggtagcaaggatgaagacgcgggggctccagtgtgctccaccccttcctttctgtcagcctgagtgctcccgccccctttgggcctcagtctcccacagagagggagagctgggtggcccagcaatctctggagccccttttggctcagacctcctgcagttctctgtagcctcctggttcccagtgtatttttaaaggatcctgtgttatttatctcagcatctctgcccccctgcgctccacgctcctatccatgcagtaatgacatccaaacacccacactgtatcttaacaatctgatgagataaatgcctcatcgttgggctccgtggacacagagtagcaattctattctgctatcaaagagctcagaaactcaggcaaccaaggcaggatgagcaggcatgtggcttgccatgtgcccatcattgggcaaaaacacattctccctgccccaaagcccctgtttttccccaaagcagcctcactttttcccttcctccacctccagaacaatgccttcgagcctgctggcatttgagaatgggccgggcgggcagtactgggggcatatggccttgttattttgatggagctcctagtgggatgcaccagccactggccaggtcctggaaataattaagctgagcatattgacctgggggttgcagggccttgggcatgctgcaacctccaacacctgttctcatgctccttctgcagtgaccctctcgtgctctaggcacacctgttagatggaacctgggactttcaaggttgtcactgccagggctggcatgatgtgcttgcactcctgctccctttatggacctgggagttgggaaggtgcattgggttccaagagaagcaggaactgatttggtcttgtagtgaaaatagacctggctctggtttggtaagtgagtgaccttggacttagtttccctagaagcagaaataggataacagtaagtcttcccacttcaaggaatgttataaggatcaagtgagatcatgtgaaattcttaggaaagctgcaagggagtctacctatgaaacacagaggccatgggacacagagggaggagtaagggctcgagctgggcaggcctgggtgtgaattccagtgtttctcttcaggctgtgctgcctagggaaatgtacttacctcttctgagcttttctttgctcttctgtcaaccaagggataatgaagctacactgactggttactcacagtgataacaggagtatctgttatttattaaacgcttatgttgagccaggacctttcttcctttcctttttaaaacctccataaaatgtagccggatttgtaatcacacattacttcacgtggactttggctggtttgtgtagtgtctctgtgagagcaggggttctacgggtattgcccggcgctgtgtttccaaagcccagcatgtgcctggcccacggtgggcgcttaagaaatgttcatgcagtcaagggggtgcagctgcctggcaaggagaacccgggaaattcatttacccttcttattattcagttccttcacctgaactctctcaggctggagctgagctttgggttcataatatataattattctccccagttaaaaatgactaaactgaggtcaggagaggttaagtgctgtgccctagatcactcaactaggaactagggaacaaagccttcttgtacagtacttgtcagagcctccttggaagcttgggaaaagggtgtgggcaggactgggcagggaggaaacagctgagcacctgccggattcaccatctgcccccatgaagatacatggaatcctatctctcataacggcctccagccatgcccattttacagatgagaaactgaggctgagagggagaaagaacccgaagctcagctccagccagagagagttcaggtaaaagaacagaataataagaagggcaaatgaatttccagagttccttcatcccagagtaggatgctcagccttgccaggcagctgcactcagcttcccgccctctctgagcaggggggttggaatgtgtctgcggagggcagcgaggaaggagcctgctggaattccttccctgtggcacatctgggaggggtattccccctggtgatacttgggaaatcatgctggcctcgccagtccttttttccactgttcttttggtctcggagcacccgccaaacatctgacactgttcaggatcgattgcacataaaatgaagaatgggtatttaaaaaacaggtttttttgtgtgtttttccccctgttgtcatctaagaagcaggtttttaggttctttgattctctcccagaataacaaccatatggggcctccacttacactgagcagcctgtgccttgtgccagggactggtttgtttccattgtcagcaaaccttgactggctccaaacattttcacttcaggtggtttctgaaagagggaaagactgaggggaaagtgatgatgtggtccctctgaagagggtttagctttcaagggtatggcaggggtggggtcgacagccagaggggtgtgactttgagaagccaactcaccggcaggatccagcgagatccaggctcggtggctggaacaaagaatgttttgaaccacacggggctctggcatgtttgttgatcgacttatccaaggcctgggccagctgctcttgttccagaagatttcatggattaactccctgggctttggaaaattgtgtcttttttaagaaagggaagttttgaaaagcaaatgctcctgggcaggctgggggtgtggggagtgttggctggagtgggaggtcacattcgccccatggtgggatggccaagggctcccagcgagggaacagttggacctgtggtgtcctggggggagggttcctctgagggaccctaatggacagaggagtgtggacccctgagcctgggagcatcgtgggcatttagaccaaaccacgggaagggctccccaatgctgaaggttgctaggcgctgggggaggttccccgggagactgtggctagaaacaccatctgccaaagatgatttagttccggaagaggcaagggatagaacgagatggtcctttctgtcccagttaatcttggtgctgttcattccgggctgagcattcccttcctgaagtggaatggaagacagactcggccttgggcagactctgagcatcttgtgaaagggagagtcttacctccttggctttgtccccaccccctgcccagggtcggatgtcttgggtgcttgccggctctctgcccactgtcctgccctggcagcaggtaccagcaagcctgtgtgccgtgtgggttacagggagtagcgggcacatgattaaatactcatgctttgtcaaaacactgacagttacaaaatgcctccgcgtctactcagggaagggtgagcaatgaggaaaatgacttcaatatgcaaaagacattccaaggagtccgggagggaatgctcattctagagccaggagggagtcatgggaattagttcttgatttatagaccggctgaaagaaatcacctaggttaaacctgcctaaattctgctatctgtgtatgtgcttaaggggatgggctcaatgaactttgagactgtctcttctctactgatgggagtgacagtgaagttcctgatgaaggaaggtttagggtggaggaattctgagcccctgggttctggattcaaaatcatacacagccctctagataacatagatgtacagtcgtacagtctttgtggagaatttgaaaaacgagaatggtgattatctacttaggacaggtttgggtacagccactcatggaagccaggaaccagcttctaaccatggaagctttgtgttttctgtataagctgtccttgactacggacaaagaatgggtaccgagtgttcagttggcatcataataggaaacagaattctacacagatggttcaacggaacagagtttcttgaggggcatatttatggaggggtaaggagaccagcaagggatattgaggcacccagggctaaacttagagggaagctgtcatcaccctagggcctgaggaggaaggggagaaaatactgtttggggggcctggtgggagctgtagctgggaggaggaccatgagggagaaaccatagtcatggaaggatgttgtcactgccaggaccaagacaccaaggtagggggacatggaaagaaaacaccctgccttctctgtcctcccatctccactctcttattgacactgctcattggccaaaccaacctgaagctggagggccagggagccgggcacctcaagcagtccccatgcaccaagcttccagggcacggggtcagggaacagagggtggaaggggtctaggggagccagcagggagctggagctcatttgtaatatttgtcttgtttagccaactctagaaggctcgtcctgagaaggcgagcttcgaaagctattactgactcttaaagtattccatcgtcaagactagtgtgtttaccttgcaaactaccttgagccagctgtaatgaaattctgaaatgtctcccatacaccctccttctctgtgaaatgtcagctttttgagggcagggcctgattcttttatgagcagttgtcttgaatcacttcaaccctccacacctggagtgccttacactttccagaatgccgtactcagtgacccctcatgtcaatgttttgaggcttttgaattggtcaaggcaaccgtcttgctgagtggcctgagttctccagtgagagaacacgagtagtctctttgagtgggggccacagcactccagacgtggtgatggaaccctctacggtatagagagcccacggccatgccacccagccagacaggaactcaggaggccaggatggaggaagcaggagtggaaggtcattggactccctttctggtttaagcttggccatgggatgtcttaagtagggctcgtggtcctcaaatgtcacctccatcctgatgccacaatgtctgtattgccactattccaattcttcttttgggtgaagtcttactccacctgcggggagagcacatgaaatcattagcaagtgctggcacagacagccattcccctctctggccaggctggaggggctggatggtggtggggggtgtgggtgaagtaagcatgaaaggggagatgaagggtgtctagacactccctttgccgagggctggtggcctgttgcttgctctctaggacaacgtggatctgtttggggtaatggcagacacttttctttcgcatccagctgtctcttcctcttctgagtcccacagggtcctgggcccgataggctctgtcacctccagccagtattgggtagccacctgccactactcaggccgggttggaagggcctgtgaggggtggggtgtgggatccagttcatggcttccagggccaatttgggtgaaattcagttgttcttcgactcctgtgtttctacttcccagtttcattctaaatggaaaacatttctgtaggtttaagtccaaggtgcagccccagagcgggtattttcccttttgagaagtggaggctaccctgagccttgggaaaagtactcagagagaatctcccccatgaggcagtgtagcttaaggagttaggtattctgagtacctccaaaggctgttcgctctttccattccagctcagactgcctgagttcaagtcctggtgttgccacttactagctgggtataagttgtttaacattttagttcctcgataccctaatctataaaatggggatgaaaatagtgtctatggtagggaattagtatgaagattaaacagtttaaattgtgtcaaggccaggcatggtggctcactcttgtaatgccagcatttagggaggccgaggcaggagaattgcttgagcccaggagtttgacaccagcctgggaaacatagtgaaccccatctctacaaaaaaaaaaattagcagagcatggtggtgcatgcctgtagtcccagctacttgggaggctaaggcaggaggattgcctgggcccaggagtttgaggctgcagtgagctgtgatcacaccactgtactccagcctgggtgagagagtgagactgtctaaaaaaaaatgtttaagtgtgtcaagtgcagaaaacagtgcttaatgcatgccatgtgccatgcaaatgtttgctcttatttatttcaagaagcatactcttctgggcagagcatcctcctaggactctggagagatggagcatccgcaaggccaccaacgggactagtatcccccagtgttccccaagcatctcttccatcgagctattgccttgctcacaacccctcagtgagttgcttgtctggagatgcaggccaaatcaatcctgtctacaatctgctgtctggctgtgcccattcctggccacaaaccctctgcttcaccaggaaaatctgtttatgggccccattctcctacttgttttcacctctgccttaccctgcctgaaaagctctccttcctcacctttccctccaaagcctatccattcttcgattccagctccagttctgccctgaaggcttgtccatgcctgtggatcaccatcctctgcctcctgcctcctcctgcttccccggctggtgtctgcctcgtatcatcagtcacctcctcccaagcagcctattgctttctctactgatgccttgagccggaagccagacagcagatattccaaaactgaaaacctgtggatttgcctgtaaatttgctataatttcttaagaacacaagaaaggctgaacttcctggaagttattcctagggccagcatcatgggagtttgacggttggctgtgtagagcagtcactccaaggcagttgatttgctttgttgttcttctcaccccatcagtattataatgtggagcttcctctgcattgtgccgtgagatgacagcaaaagggctgtggccactgcctgggacttgatccttcgctgaaacagggacactttctatgactagtgctacgttacatttatccgttctattggacacatgttcgtaggcccaggatcagaataaaatagctccacagctagaagaaatcagtttataggcaaacaagactctgatgttggcccttaaaaagaaactgctcatattacatattacagtttaattttgtccgcgttagaaggtcccagtgatatctttgcttcttgactgtagtctagtgtttaaaggttatttgcccaggtgacttttttatcttttccaatctaaatacagttgtcccttggtatccacaggtgattggttccaggactccccaaccccttggataccaaaatccttaggtactcaagtcccttgcataaaatgcatagtgttttcatataacctatgcacatcctcttgtgtaccttaaatcatctccaggttacttatactacctaatacggtgtaagtgctatataaatagttcttatgatgtactgttttcatttactggtatgatttttattgtcatattatttttattaaaaattttcttttcaaatattttctatctgtggctggttgaatcaccaagaatgcaaagggccaactgtatcaacagctcaaagtggagagcccagggcccaggcacggatcattaggggaagtacagggctggcagagaagaaactggactcccagagccggctctttctgtgggctgggagctcctccaggctgctgggttaggaccagcaggacggccagaaccatggagacatgctgctggttttggagatggggagaggcatgtgaccttttctgggaatcaaatcagagtgaaaccagaagaagaatctagacttcttggggtaacttggcaaacaaagctcagatagacggaggggtgttcaaggaactttgcacgatttcctatgggctaagagaagacgcttgcaaatctgaaagggcaacatagggaaagttcctacagggaagggagacggtcaaccccctctccctgaccccgggcttggttagggggcagagaacgggagggggtcaaggaggctgtctgtttccctcagtgcaaatgcctggacagcacgtgtgtgcaggctgtgcccctgacctgatgagcacctgatgggtggctgttgaccgactgtccatgcaaggggtgtgggctgtgcttggcagcctccagcaggcagggcttgttcacctgcgtcctgtccagcacgcggcaggagctatcctggcctcagtgttaaaaggtggccctgggtcgaaggagtggcataaggtcccacttgggtgcttgataatgatctagagcctcgtgcccttatcttcacggcctcctcgtttatggcagcaagtcctcgtcctgtgggccccatttctaagctggacgtccagcagttccctcagaaagtgctgtggggcccaggcgtcctctcagaggatatgagcactcccgagtcgttctcactgcgtgtgttcatttcactcactgcctgcttccttcgttcagctccaagtacctgctgatgtttctgagctaggagggcttccttcaggtaataggggaagcatgatctggaaaagggaaggtttccttttgccccatggagagacgtcctgagacacttcatcaaccaggaaggctcccaggcagccactgggttgcagtgaaagttttcagccgctggtgactgctctggtgagacttgtgagagagaacagtgacggtgagcacagcagcccctcagaaagcaaaccagggagtggcttcccgacgtgcacggtttctaattcacacggtccctgcataagctaggcattcctgtatcctgttttcacatgaggaaactgaggcccctggaactcacgtagtttgcccaaggccatctaactaggaggccgtaattagtgaagctgggatttacacctagggctgtctgattccgaagctgggctctttccacggtatggtctgagggtgcagtctagagcggggactgatggggtttgtctgaaggaacatgagatggtggagttccaggctggctggtgtggggccccggctgggatgagacagtgtcttcaagtgtcagggatggacgaatgtccctgtcaggagatgttggtccctggcagccaggcatggtggcagcactcccagcctggcctgccctgcacaaaccttcaggcacacaggcctcttgacagagtgatgattgggattccatgcctgcaccagtggtgggagagatgcaggtgaaacaaggcggaaaggaccgtaattacctcctaacaggtttccacatttctctgctgtcagaatggttttgttttctgatttattttgatctgcttgaaaattagttgtggcagtgtgtttggtgtgtaatcattgtcctgctagctagcagtcatcatcagcaatgttagcccggcaaacgtgatctttctttcctttgcccaatacatgtcaggctctgtgtggcaagggcgagggagaggcatgactatgtgtctctgcctgtctgtggaccccgactcctcaccatcacccaacaggggacagtcctgctggctgtgtcttcccggaaggctcgtgcccgcacagattgtctggtgagcccgccagctgtaccgcatcgctctgtgcatgtgacctagctctctcctggccccctgttccatcccacatgcagcctccgtccactgtcccccagctcgcaacccccacgcagccccacccttgacctgccacctccatctgcacctgcttgtggagcctgtgtcatggaagagaggtggcctgaccactctaagcccacagcaccactggatctttcccctctctctgtgagaagacggccagtctcagattggatttgaccttttcgcttgtggtcgggccaggttgagcaggaaaccatcgttagggcacggaagcataggtgggagaagacagccagcactgtagagtggggagggctcagtgcttccacgggtggatgttcagcagcaggccccctctgttctttggtgaagcttgtctgcagcgagccctcaaaaaacatgggttttgagccagacggaaagtcatcaagcccagttacagtcatcccttggtgtctgtggggagactgattcctggacccctctcagatacaaaacccaaggatgcccatgtccttttatgtatgtagattatatgcacatactacaccattttatgtattttacatatggtatattttattttttaatttgtataattttttaatgatttttttttcctaatattttttacccaaagctggttggatccgcgggtacagagggccaactgtatttcattattcagagcagaaaactgagacctaacacataggcaaggatatgcttaagaactactgttggttggctccaggtctgggatatgaacccgaatctctgttgcagtctgtccaaaagtgggctgagctggtttcaggattggagcagacagctgtccatgtgctggaatttgagggatctgccatttcctccctagaatttctacctttagcattacctttgaagtaagtcagggattaccaaacatcttattaccaaagaactctttcttcccacatgacccaacacagaacagaaaagagcagagatgcttttgttcaagtgcatgggaaagaatggatgattcagagctgacctgttcagcttctcctgattctccagcgaggtcccttatgcttcttgctagaacctttagagctccatggagtatagtgagaaatgtttatggcctctattaccagggcagatgaataggtgcagacgttaacagcttctacaccttaattagcatgggtgtgtttagcagagtaattgagatcagagactaggttgataaaagaatagggttcccaacaggatagtttttgattaaggaaatatttggagcactatggaaatgcttgaaacataggaagggcaagttcagctggagtgcattgggatgacggagggtggggtagcggggtagggtgagaatcagggcagcctggaagctggggcctgaatcactggggcagggaccagggagaccagagagaccagagaaggtctcagacataaactctagctactccataaaactacctggagcatgaaaatcccagcgcctctgccacggcctagactgctcatcacaggggttgcaaagtcacaaaaaagatgatggcattgagctttcctatcaggaactatgtcctcaactaatattaatagctgacatttgcatagcacttcacagttaatataacactctcatatgttaggtgcttctcttaataccccttgaggtagctattgttattgttattattatccttcttttaaaggtgtggaaacacagggtcaggggccccgtgagccattacttggaaacactgtcattaacaattacttcttatagttgtttctagcaactcatgtcctggaaatgtctggtttaattcatctctctctccttctagtagacagacagacagacagacagacagacagacacacacacacacacacacacacacacacacacacacacacacacacacacacacacacacacactgagggctgatagggaagaggacttctcttcttgattctccatagctgtttcccaactgttgctctctaacaaaaaaaccccttcagaaccctcagccctgctcagaaatctaaggaggcttcaggcagcaacagtggggtccaccccaccctgaagggctgctgcaaagatctccaggaggaggcccccaacaccattcctcttgaaggtcccagttcagtgcggcttgagtccttcacctctgagtctcagccaggcaacatccgaaggagctgaggaagccttctctctcctgccttctctacctcacaggagatggctcctgtcctccccatctccctcccaccataaccgctcaccaaaaattgacttgttttctctgatgctgctttattgcatgttaatacttcattactggacctgattctgttacactcgcacagagcaagcagagcagagggtcctgagcatgcggcattagatggagaaactgcctccagtctcactcatcgtgctgagatgggttgcatggcacaccactcttagcacagactgaggctggccaggccacccatgctgggtgctgacaggcctcaagcctgcagtgagggccaatctcagtcctcatgatctgcactggggacagaagccatctgattttaaattccataggaataaaccaatgggtggagtcaccaaatatccagatgttttctcccagctttcatatctgccatttatttttaaagatgttttaatggactaggtacaattttcatacataagattcacccactcagtctattgttctatgaatttttaaaaacagcttatctgaggtataattggcatataacaaactgcacatatttcaactgtatactttggaaagtttcaacattgaccatcagtgcaatcaagagggtgagcatatccatcactcccaaaagtttccttttgcccctttgtaatcccagtagctcagccctcctccccacccctgctatctcttttctgtcatcatagattagtttatattttctattgttttatatcaatgaagtcatacagcatggactctcttgactgccttccttcattcagcataattattttgaggtttacacatgtctctggatgtactgatagcttattcctttttattgcttagttgtgttccattgtatggatatagcacagtttatccatccatgttgagctgtttccagttttgagctatttaaataaagcagctatgaacatttgtgtataaggcttcgtacggatgtatgctttccttttctcttgggtagatacctgggagtggaatggttacatcatgtggtagtgtacgtttagtgttttaagaagttgccaaactcttttccaaagtggttgtgccattttgtgctgccatcagcagtgtatgagagttttggttcttctacatcctcaccaacacctggtgtggtcagtatttttaattttaattttagtcattataatgtgtatgcagtggtatctcattgtgttttaaatttgcattttcctgaagactaacaatattgaacatctttcctgtggttattggccactcgtatattttttggtgaagtatctgttcatatattttgcatacattatatttgggtcattttcatattattgcattatgaggtttctttatatattctggctggctataagttttttttaaaatcagatatgtgctttgcaaatattttatctcagtctgtgtcatcttttctctctcatctttgttggaagtcattttccatatatgtgttggtctatttctagaccatctgttcagttccattgatccatttgtctatttttacaccaataccacactgctttgattactatagctttataataataaggcttaaaatcagatagtgctagttaccccttcatctttgtgatttttcatagttgtttggttattctagaccttctgcatttccatatgaattttaaaatcagtttgcctatttctacaaagaaaagtgtttgcttcatgtatttatttgaaagctctgttaataggtgcatgaacatttaggattgttatgcacccttgaagacttgacctctttgctgttttgaaaagccctttctaatccctagtgatagcctttgcgctgaaatttattttgcctgatattaatatagacagtccagtgtccttttgactgtgttagtatcgtatagttggtcctttgtattctcaggttctgcacatgcaaattgaaaatattggaaaataaaaataaaaaatataacaaaaataatgcaaatgaaaaatacagtatcaactatttacatagcatttatattgtattggtttttataagtaatctagagatgatttaaagcatatggagggatgtggataggttatatgcaaatatcataccattttatataagggacatgagcatctgaggatttgggtatctgtggggcaggaggaggtgtgtcctagaatcaatcccctacagttactgagggacagctgcatatctttttctgttcctttactcttaacctatttgtgtctttatatttacagtggatttctcataagcagcagatagatgggtcttgctcttttattcagcctgacttaattggcatattcaaccaatttgctgttgatgccttgctgtgcttcggtttaacctcttgatactttgctgtgcttcggtttaacctcttgatactttgctgtgcttcggtttaacctcttgagaccttgctgtgcttcggtttaacctcttgagaccttgctgtgcttcggtttaacctcttgataccttgctgtgcttcggtttaacctcttgataccttgctgtgcttcggtttgacctcttgataccttgctgtgcttcggtttgacctcttgataccttgctgtgcttcggtttgacctcttgataccttgctgtgcttcggtttgacctcttgataccttgctgtgcttcggtttaacctcttgataccttgctgtgcttcggtttaacctcttgataccttgctgtgcttcggtttaacctcttgatactttgctgtgcttcggtttaacctcttgagaccttgctgtgcttcggtttaacctcttgataccttgctgtgcttcggtttaacctcttgataccttgctgtgcttcggtttaacctcttgataccttgctgtgcttcggtttaacctcttgataccttgctgtgcttcggtttaacctcttgataccttgctgtgcttcggtttaacctcttgataccttgctgtgcttcggtttaacctcttgataccttgctgtgcttcggtttaacctcttgttgttttctgttagtcccatgtagctttgttcccttttccctctttttctgcctccttttggattaactgagtatttttaaggattcagtttcatctcttctgttgacttattagctaaaatccattgttttgttattttaacagttgctgtagggctcatagtatacatcctttttttattatactttaagttttagggtacatgtgcacaacgtgcaggttagttacatatgtatacatgtgccatgttggtgtgctgcacccagtaactcgtcatttaacatgaggtatatctccaaatgctctccctccccccgcccccaccccacaacaggccttaatcatcgcagtttgtcttcagttgttactaaaccccttcacatatagtacgggaacttcacaatagcacacttagatcactcccttcctggcctttatgccgttgctgccatacatgctaattgtgcatttgttctaaacctcacaatacattgttactatttttgtttaggcagtcaatgatcttttcaatgaaaatcatatatacttaaccatgtcagtaccatttctggtacccttgattcctttatgtagatccacacttctatctcatattattttccttctgcctaaaggacttcctttaacatgtcttgcagtgcaagtctgctaggattaaaatcttttagcttttctatgtctgaagagaagtctttatttttcacttttatttccgaaggatatttttacttagtatagaattctcaggtgatagtttttccttccatgactgtaaagctatgattccactgtcttcttgcttgtgttgtttctaataagaaacctgctgtccctcttgtctgttccactgtacctaaatgtgtctttatgccctggctacttctaacattttctcttgatcactgctttgaggaatttgattatgatgtgccttggtataattcttttttcatgtttctagtgcttggcattccttgagcttctggaacctgtgggtttatatttttaaaattaaaattgataaatttctggctattatttataattttttttttgcttctccccccattcctgtgagaactctaattacacatgtattaggctgcttgacattgtcgaacagatcactggcactttcattttatttaattcttttttttctatgtccttcattttggatagttcctatactatgtgtttatgaatcttctctttttttgccatacataatttgcctgccttcttccctccctcattccttatcttccttcctttagaagaacctagggggatttacctaattttataatgattattatttcagaaccaatccagagcttctgttcccaaagccaaactaccgattggagattctggagggagggaacacagggggtgacattcctggaatttgggggacttcgcaggacttgacattttagaggctggattagggtacatccaatttctcctgcttcctccctcttcttctttcctatccccaaagtaaggagagtcctgtgagcccaaaggcactagacagccctagcacactcttggcagacagggctgaacgcccggatttccctctcaatagggaagacttagggagcctctcacaggagtgagacaggaacagcagctttatggaaactgagttccaagtcaacacccggaagaaaactcaggctcccctgtaggcctggaaagctttgtctgagacaatgaccttaggaggaggtcaccaaaaccactccttccctcacagctcatgggatcagagtcagctgtgcctgctgaatgagtggtcaggtacagcgcacccgcctcctgccagagaaaaggagacctgcagtctggctgcggcaggtctcagcagaatctttagctttcttcaggcttgatcagccacctcaagacctgtgctcatttaaagaacagagagtacatgtaagttaggaatgttctcgacttcaagtaacaggatacttaaggactctgaattggttcagcagctcaagatgccactgagaaccaaggctctttctctctttccacttccttatactaagtctgttggcttttcatattcaagctgatttccttatggttgcaagatggttgtcaatggggctccaggcatcacacccccattcaaggcaggtggaaccaggaaggagtggagccaataacactctggcccttttttttttttttacataaaacagaggctttcccagaagtccctagcatagtacttcttgaatttaatctacacaaggatcccctgggaatcttgttaaaatataggtttggatgtagtagatcttgggtagagcctgaaattccacattttgatcaagctgccagagtgtgtcagtgtggctggaaactgcattttgagtagcaaggtgcaaggctacttctccttactcttagtgacacaatccaattaactagctacaactggctgcaagggaggctgacaaagtatcttacctttttcaggggagactttgggtagcaaaccaatatcagtcacagaattctactgaaaatgcagggtatggaagcatctgaagtcacaaggttgggctggacaaattagagccttcacctccatgagggaagaccatggaccccttactctatatccacactcagcctgcagggacagggcattattgccacgagccagtctgtcctgtatactcactggattagggattccactttcagaattttatcaccttagcacccagcacagtgcccggtacacagcaggtacccaatacgtgtctattacactgaaatgtttattggcacatggtctaaagacagtgccagggaatcctgtgaaaatgcagtgctgattcgggagatccaggatggggatccaagatgatgcatttggaacaagctcccagaggatgctgccgtctggtccgaatcctgggccccactttcaatagaaagggcctaggacatgcagagtaaagtccttcctcctgagttagcagcagctacttgtgcttcattcatgcaggcatgaagctgcttgcaaggatgttagcagatattagatatggctggtggggaggagtaaggagggccttggctatgcctttttccaagatccgggagctggatgctcagagatctcatccctggcttccttgtccactgaaaacaaaacagcagtatacccgggtgaggagagagaccagccaagcacgtctttcaacaactcttaacttgcttggctccagccacgaaacaggaacccgccatccccctagctcgtccctggccctcaggaagtgctgaggctctgccgggctgcatgagtgaggggccgatgtctttcagatgttggggcttcagcgggggagtggggtaagctggggagagggagcatttttttgtgaatattttacccacggaaaaagctgaattctctagaacagacctctagatttttttttttttttttggtagtgggaagtgagttactggaatttcttctgaattcgaagccaaacaaagtttcttgcggttttagttacacaagcggctgctgccaagatggaatgaatgagaagagccactgaaaggaagagacagtgaggggctgggggaggagggtgcagaacaggacccaggcgcagcacagaacagccctccaggcgggcatactgcccgcttctatgctgtcaactctttagggagagagctcactgttctgtctgcctcccaggatcagaattaaaaagaaaaaaggtctgtgaaagtgaggcatacactggcagacacgcacacatgtaaatgattatcattgctttgtaatttaccataattccggcctgtgcactctatggggtcctgctttgttcagtttcctgactgagtggcagttggacgagacacttctgcccctaagctgcaggcaggcggctctcatttcagccttgttccagtgtgagtctgcagggaagggatgcccgctgctccaaggggaagcaaggataattaacttctaccagtgatccccaaacttcattttccttagagcctgaagcctcctccttgttaccttcctggtagccacagaatgggccagggccatgtgtctcctttcatttctccagcctgccctctggtgggcgatgcccttcagtgagcggggcctggggtagggccgttctgcagatcctgggttggcttccagtggtgcctggcatctctcctgctctctgggaggagggacgggccgctaagtgctgacggcagcctgtcactcacaccttgctccctctgtagaaacactctgtttctctccattccatccctgcgtgttacctagcaggaatttcctcttccttgggtcaagcgggtgggaagggctcatgattgctgactgaactcaaccctttacactgggcattcaatgtcatcacattgataacttgaaatgggcagtagtgggaacatttacaccacaaaaactggcatatgctacacccagagctttccttccccctctcctaaaagccagttgctaaaacatttaacaacataccactggctggaaccacttgtgaaggtgacgtagggctgcagggagagcccaggtagtggaggaaatggcagccttccttccttgcccatagcctgtgccggctacaactcaggagcttttggaacttaggagctctgttcttaaactctccttaaacacctcctcatcccagacgggttgactttcaatgagaggactctgctgtgccgcagagctggaatcactcaaagcagagtgatggacgagacttactttcgacgttcctaggctcccttccaccgttccctggtctccaaaccccatgttcttatctgacggtatttctactctttttctcaacctgttgctaacgtgctcattcgagagaggctggtgcgcacctacccagcggctttttgggcggcagtggaagggagtgttttattaggaatttacgttatatgtgcaaggaataccacatggatggtaaagttcagccgttttccactgaagatagggattcttcaaactgcacagcttttcaggccatttcgtttaggcgagccctcatgttatagtcagggagtttgaggcccagggacatttcccaggggatgaactctaactaaaaatgaaggtctcctagtcctgtcgcctgttttcttcactcagctgtttaaagggatgttgcctcgtgtgaattatggatgactgccagagttattagaatgaacagagttaccaagagctaaatactcgtcatttatacctggccggttctgttttcagttgtcctttttctttgcaaagagctttgaaacaagactggcctgcttgaccttccatttagagttaatgtcaaagcttgctgaggcctgggaaacaggtttggttgtttgcattaaaagggagtaggaagcaagaaccttaattatcctaggctctggcctatttaataaggaatttgagaagatgtcttagtggctagtattcctagaacataatacttgaaagtggagcgagcgggtgaaaatatgccttaggcaggaagccagataggaagggccagtgtctacaggctctgcacagtaaggaccctgtgggaagatgtcacaggtaacagggcctgatggcccagcacccagctgctttgcagtagttctggcttcggggcttctctgggtggctgaagaacaggtctgtgaggttcattcgggggctcttgttgatcaagtgtggatggtgtgccggacacagggctggggctgcagagtggaggaggcgcagtccctcccccgagagcactgtggccagtggaaggagacaaacaagaaacaatgacaggacccaggctcaggctgtcatgagcagccctcctctggagagtgggaaatgtgcgttgggaactcatgcttacaacttttatgttttttcttactgagcaatgctcataacaggagaaaggatttcttcactgtcccaaaagaatgtgcctcaggactgaaattggtagtggccctcccttactcatgtgccccaagcacattggaacgccagaggaattttaagcagatttttattcttgttttctggaggcaaaatctaaagtgaagggtgtgtgtggagaggtcatgcaagaaatttggaagctgtgtgccttgtctggctgactgtcccaattaccccgggcccagaggtgggaggtcccacaggggcctgcccccagttgacagagggctctttaccgttaggaccccttctgggtttctcaaattatggcttttcctccttcatggtctcctggtacttttaaccccttctctccatttttcccaaggaatattctagaggaagggtttctgggaatgaccttcccaaggggagggatcgggcaagtattgagtcattcctgctcgtctggattgtgattgcgacccgtgcctcatggagtgtcgctggatacgcgatcagtgtcccttgaggcagtgctgcacatggtgcagttccagagaaatgagggaatgagaatgaacgtggctgctcgtgtgttccgtggctgtttaggaaggttgggtcagtggagatcagggcccgaagagcagtttcagcctgcgtggtcttgatgtggtcttggctgatgagaagctccctccaattctgtgattctgggtaaagcagaccatgtgccatcgggagtgctcctgtgattctttaagttagtaattctcatccctggccacacataagaatcatctgggatcatttaacaaaaaacaatgccaggatcctacagtctactccacgcccttcattttcaaacttgagtgggcaccagaatcacctggaggatttgtgtaaacacagattcctgggctccagcttccgagtttcagtggctccaggatggagcttgagaatttgcatttctaacaagctcccaggtgactcgctgctgctggcctgggaccacactttggaaatcacgattatgaacaggaatcagaatttctgaagatgtggcctgggcatctgaattttttcacattctccaggtgattttaacatatagctctggctgaaaacgatttctgatcattgatttttttttttttttgcatcatccaataactattcattggtcagactgtgtgctaggcactgagttagagttgaagaccctcaagaattccactgacaactgaatcatcaaagggaaccgagccctgcccaaggacatacagttgttttcctcttccttgtcctttggagaagcacagctgaagcttcctgcccacaccccagcccctcctccttgagcatgaatgtgcagtaagtatgagagcctgtcatttaccctccctggcctccctctccagccagcttctctctgaggagtgaggatttcttgctaagtacatgatgatggcctgtttactttgctctggagtttgaggctcttgcgcagattctgccttcctggacagttcaggaaccaatcaaccagctggccttggcaacctagaaagcatggtcagttgccctgaaataggttgattgcaccccagaagtgcttttccgcctctccccatcaaaggtgtttgcaaccccattttccctctgagtcagcttgtccattaatgggtttgtgttccttgatggggtctgtttttccagggtcttgaggagtggccctttccacccagtttggctgcggggctgagaaggtgcccttgcattttgtattgtgtgtccgtggtgggtctgtgcctcccttctgtctgttttccctcaggaccacccaccgccccatgcttgtatctacaacagctatgaggaagaacatacagattaatcaccctgctgcgggatgccagctacccagtggctctggcagccccagtcaatggatcctgcagtgtagccttcatcagtagagctgccactgccagcacccaaaaggtagcactaatatgcatgtgtgacctgaaaattacaatgtaaatggtggggcaacacatgtataggaaggtaaattttaattaaaagtctgttctccaactcagcctgcctttaaagatacagaaatgccaagctgtcaggctgccggtcgggttaagagggttctctcgtgcactgtggaccaagctgggagaactagggcttcattgaaatcggatgcctttgactaattatgcaccaaatgcatcccatatggggaagatatgccctcaggtggttagcagagccagcaggagccaagcttcctgaaaaatgctgggtcttctctcctgcagtgtcagggggtgcagacagtacagagggagggtatgagagtcgaggcacatgccaaaaaggagcaggtgggaaaaaagagcccatggcccagcagcaaattgtgtgtctttgagtggatgtggcttttgaggcactatgcccaatagtcatcctgaatttccttcactgcctggggagggggtggatggaggagggaaactagccacctccagaggcaaccctgctggacaaaactcacttttagaaccatcagaagcccattttcctgtggaaatctacggggaagagatagagaagagctgcagagtctattaaatgtgtgcttgctgcctggtctccggtatagtcaggaaatcagatttgtacagtggaaattcattcatgccacaaatatttattgagtgcctacactgtgctggtggtactagggactggggatacagcggtgggtgagataaaggcacgacgccctcaccgagacttgtgtgccactggagaacatggattaaaccaggcgttacgtgatcagtgtatcagtgccatatgggcaatgatccaagctgccgatgggtacacaccggggacacctagttcttaagtgactttttaggatcccaagtggtcagaacagcttccctattttgccatttacatgttcacattcacttagctcaagttacccttctgataagaggaaattcgcgtcaagtcacatagaatcactgaatatttgcacttggaggatcacctggcctaattcttctgctttacacatgcagatgctgaaggagagaagttaaagaacctgtccaaaatcgcacagctagttagtaataaagcttgggtggaattctgcttttctgactcccagattagtatttctttgactttacctcccctttggaaaaatgaagcgattcaggggaagttcctgggcatttatggccaaactgccctcgctctgaagattcaatgttttaattggcccggcagagctggagtccacaggtggtaagcatggacaggtggagagccagcatcagagagagcctcctggccagcgcctgccttgcttcacagatgtcaaggcaattggggattgggggcagggtatgataaagggcatcaggaaagtggcagtgctggggcactgtcctctgggcctccctgggctcagctgggcaggggcgtgttttcagagacaatggtgttgactccctctgggcagccctgcagggtggcagtcccacaacagaaatcttggagcagatatgttggaggatatgtataagaatgagggattagtgctggttgggggcagaaaaaatgccctcttggggagaaagaaatgatctgtgacaaaggacttcctttcctaaccaggcagactctggaagatgaccacgaggctgggtgggaaggtggcagtggaaacgtgattaattgtactgtccatggacagtgagccgaggagcttgtacctggctttattagagacatacactcggggctgctctacccagaatccctcctgctgcctccagggctgctccactctgtgtcttagagatgagaaaaggagtcaaggactcctaccagcgtggaatggtaacctctggaggggaggtaggtctcccagggatctgagacgtgttccaggaatggaattcccagtatccttggcagtcatttcaggatcttggggacctagggatgctgtctggactgctctaaaatagcccttctgtggcttcctcaaatgtattgtctgaatcagcagcttcaaagtgatatcagggggtttacagcatggatgttggagctatgtagactggattcaaatccccagttctaccaattccagctctgtgtgcagggcactagaacttgctgagtcctagctcctttgtaatatgaggtgatggtgaatatgtcgtagggttgttgcctggattgaaagtaggtaaagcacctactagcgtgtctggcacctgggaggtacttaaatggtaacccttattacaacaaaacaataaaaggtccttccttttaagccagaaaagttatttggaaatggaacagtcttttaatgacggggacttaaaatcccaaaccaccagccaaaacaatcaaaatggaacccagacggatatttgctcaagggcccctggcttctcaagggcctactccgccgcagaatttgcctgcaccacctactggtggtttcttagaactacacactctctttctcgactgctctttggtgagcaggacaccaggagaggcagggaggaaaggaaggtaactagtagttttgcaactgttttaattacttcaaattgagatgtttgtaaataagatgttagagtctggagcttttgttcggtcttgtgtttagcgtaaatatagttttattgaaactcgtcacagaagtaccctgcagtggagggcgcaggatttggctgtgacggagcagagctagaggccacttgcaaatggcagcgtttggaagtgcctgttctgggtagagcatccaggctgcttttgattggctgtttgtccctcccacgaagcaagaaaggtgaatgtaaccagcccactggaatcggtccttttgccattaacgtcacctctgtttactacgtgggaagagtgattcacatgcaggaagaagaccttttccagaaatcctccatcagctagaagaagagagagatcctaattagggagccatgccacatttcattctgagattttgtttggaagcatttttccaactgagaaggtaggaaagggtcgtttaagtttcccactgttctgttgggcttaatgacctgcccaggtctcaggctgctctgagctgagctgtcagtgagaccagcaggaggacatcactaggactggaaatagcgtggagtcaattgacagacagccatgaagcactactaagtgccaggccttgtgctggctcccggggaggcaaagaaacatagaacatgaccttggtccttaagaggttgagagtttagtagacaagagaagcctgtgctaaatctgtgtacaatagtgagtgaagcaagtgctgagtcctagtggacaggtccatcctcttgtggaatattggagaaggaagcatgcatgtgttcagttagacacagtttctgacctccaaggtgaaggttcaattccatgcacgtttattgtgtcccattttgtataaacagagcacgtttgttgatattctgaggtatttggagaaggacacagttgagtaccatttttcagccctttcacattgtgcagtacagaggtcaggagcactgtttcaggaatcagacagcccacgtttgaaacctccaggacttaccacctgtatgtccttggtcaagttatcaaacctctctacagcttcatgtatccaatcaacagacgtttactaaatactgtaccggcactggcaggcaggctagagggactgaagggatgtgcagaggttggtggagagggtgagcagggcagagactgagtgtgtctaaggaaagctgccagctttaggcggcctggggagcttctagttctcagccaatctcttccctgaatgggcagcctatgggtgaaggtccaagtggggatgtggctgtagtgtctcttcctgcctttctcccatgccctgcggcaccaggcccacactggagtgctggtgggagcctgcatgcctggttaaaggggcatgccagagagctttccgtaattgcgtcctttctttttttttttttctggtgtatttatgagttttaaaagccccttggcaacccaggaaattccatttccctctgcagctcatttataccttccttgatatatgcccaggcacaaacacttgtgtgtattatttggttgttcacggggaatcttgtaaaatctgaggccttagtgggtgcacttcaggcttgagggcaggagagggaaaggagcagaaggtgagaaggtaacctctggcaaggaaacggtaacacttttaaatctcctctgaagaccaaaagcaaaagaaatgggctcaacctgtagcataagtgtgctagaatagacacaagcaagtttttcctgatagatgtcaaatgcctttttgcctgttcacaataagcttttatacatatggccaattctcatctgactgggacaagatgcagggagtggaataaactaaatgtccagtgtgcgtaattggtgttgctataattaatatttttcagccctgtgactccatgaatgcctctaacacctagagcaggcttgtccatcccatgggccactggccacacgtggtccaggatggctttgaatgtggcccaacacaaatgcataaactttcataaaacagtatgagatttttcttgcatttatttttagctcaccagctatcactagtgttagtgtattttatgtatggcccaagacaattcttctccttccaatgtggcccagggaagccaaaagattgggcatccctggtctagagccttccacagtttgacctttagagtatcttgctttggcttattctttttcatatgtatgtacttcattttccaaaccatattatactcttatcatttttatttgtatccctaccacggcctaaaatagtgcctgaatatagtagacaataagtgtttgatgagtgactaatagataacagcagcttccagtgtctgccagtgcttacactataatttatcatttttttcttaaggtgacagagaactcttgtaataactctaatagcaagtcttcttttgtgctaatatattaattgaatcatttattaactttctaataatatgcaccagccactgtcaggcactagttattcaaaggaagacgagacacaaccctgaccagacatgaggggtgtttaccatccacctgggagatgggcatataatttaaaatgaaatatcgattggtaatatattaatgaagagtatatattcataatttaggacagaggaagtgctttttgcctggccttaaaggggagagtttcggggaggatgtatttgagcttcatcttaaagacgagcaggagtcagcgagaagacatggcagcggtggtgggtcctggcagaaggaagagcgtggcccatagcatgaggcacgggtacggttgtgcttggggagccctgaagaggcggctgctgaggaaggtggagctggaaacgtagattggagtcaaagcacgaaggccttgaataccctgggcagaagctgagcaggcagtcagaaaggccctgaggagactcggaagggtcacctggggcagtggagagtgaggggcgggggaggctggccaggaaccatcgcggtaggcctgatgtggtgggggaaagattcctcttgtgcgtgctgtcgggatacatcatggagcctgaagcatgccaagaaaccaagcaagggagcgtggcctcaggcttgccatccgagccatccaagccagaggaacccaagtacagctgcgggtgaaatggctttgttagttaatatgtaacatgtcgcctcaatattgagcatctctggcagccgctgggactgcgggcgcgttgttggtcacactgacccagacaagtagtcaaggcagctttcaccacagatcaagcaagagagttggcagtaggtggggcagggtggtctccgtctgtgtgcacatggtgctcagtgagtcacatctgctccagttgtgtaatctccgtggtcagtgaagcaatgctgtgcgcacagttctgtgttgtgcctctcccggggaaggggtgtatttggcctgtgccccaccctagccctccttcgtcttccctctttcaccacgtcttccggggctggcttgagtgtgggagtctttctgccagctccctgcctacagccgcccactcaccagcccttcatgtgtgcctctgagagtcttcttcctaaaccaccccgtgcccttcagtccccttgtgaagcctgggcagtgaacatccttaagcccttagcagcttccctgaatccactcctcgttatccttcaggagtcctcccatatggtcaagcagatgaattccttgtttcttattcatgtcatgccgcttctcacctctggcaaccccaactaacatgcccctccctcttttgtctttcaaggtttcattcaaaccaaacttccttcttgaagccttctgcaaccccatgcctctcagtgaaacgtccttccttactgtgcacatgagccctgtggcacgtgacaactgtgcctggataccccaatttctctttctaaggcagggaattttcttgtacttcctttagtcccagtacctagcagaattctaaaaaacagccattcagtgaatgtgtattgatatcaatgattctggcacagctgacggggccaaataaatgctaagtagtattaagagtgataatggtttttaagtaataacaatacctaccatttattcattgcaatgggttggtcacagtgctagacccgttacaaccatcatatgattgaatacagcgtaaccaacctgtgtcttggcattacttccattttgcaggtaagaagtgacataccttgaccaaggtcatgtggctagtaagtggcaaatgtggaagtgggccagtgttctgcttcttggcccacactcccaacctctcaacatgtgtcctctgccatagctgcatctcccagatcgcatgggattttttcattgttttgtttttgtgaccacgttgcttccttatccctgtgattgggttttgcccatgtctctcctatgagagcagccttggtaagaagcagggagaatggaagggatatcacatgccagaatggtcagaaaaatgaggttgctcagcaggtgtcataagaacggatgattcatgcactgtgccttagagtaaagatggagaaatgcaaagggagtggggagcagagagacgctgacagatgatgagtgagcacaaatgtttatccatgctaatggagtggggacgtgatagtcactctgttctaatgcttatgaggagcagtctgtgggctgcaaatgcaggagcacaaggaatcttcaccctagtggcaggggaacctaaaactccaggctgcaaacagtggctggagcatctctgtaacagtctggccttgcagatccaaaagacaggtcatagacaacaaagacatctgatatttcctgacactgccatcctctgggctctgggggagtccaagatcatttgcagcactgccctgggagtggtgacaggctggaggaaaattactggggtctgaaggagtgcaggcccagctttcctcttgcttctaaggccaacccaaacaaataattggtgctgctttcagaatatcctcacatgggaccaccaccacctccactaggctctctgtccccagccttctgccttaggcttttccacctcacactacactatctaaattctctaccgtagagccaaggagtgaggataagggaaagggaagccaggggttctaagggaaccaaagtagtaccaaattcccccgttggtctgtggtctaacagtacggaaatggatagccatctgcatggggtggaaatgtctcttctttgtaaatgttccactgcctgagatttcaccattctagctttactttgcttccattattccacagtttccaggggaagagaaaactttacctggctaacaccttgatcagaatcacttcatcacagatcatatacatccacagagatgactgaggaaacagagaagagcttagaaagccaactctgtcttcatcaccttttggtcttggtcctcctgccttgggggtataaccctctcttagtttgtgggagaaaaatatccatggtaagaagaaagatgtcaggtccaggacagcaaagaaaccgctcagtaatagaagcaactccgattgcatgagcaggcttctcgagtgctgtcctgtcagcctaccgtccacattcctggtgtcatcaactctctagggacaggagcacagaacacgtgggagccgtcactgcaggagctgtgttagtgacagcagcattcaccagaggcatttaaaggctgattgttttatccatagcattgtctgggctttgagagagaaatcctgcctgcaacaggagaagactgaaaaatagaaaaccattggcagtatcaaagggttgtcattagtggacaagtacactggcttgattcactagtgctgttattatggttgttattttaatttgtcaagagacaatgggttgttggagaacatgggcagtggcccttgcttccaaggaggaaaggcaaagggaagagagatgctagggggtcgtttctgtagaaagcagacgcccaggtgtgtattttccccaccactgctgagccccacagcatggcttgtgaattttacaagtgatactgtgacatcgaaagcattccattgcgtctttgtgagaatctagggtcctcttttatgcttagtctaagtatctacagataaacatgcatctatattatatatgtgtgtgtttctccatactctgtgcatatacttaagtctgtaatgtgcatatacgtgtatctgtctgaacagttggatatatatagatgtgttgcagctctccaacctttaccaaagaaacaaaaaaaaacctaaaaccacacacacacacacgtgtgcacatgcaaataaataaatagagaaggagaaggaagaaaagaaaacagccagaggaggttgctttttctgtttcagaggacctcagcagttcttcccaaaatagacttctgtccttgctgggtaacatctaaaggagacgacatcacagagggtccaggcaagggctgtggagtccgacagtggggttcaaatactcacatgtgctgttgtgcttggtgcggcaactcaacttctcaaagcctcagtttccccatctgaggaagagggacagtccttcctgggaagagcaccctgccctccccatgacaagtgctcagcaatagtctcagccttctttcacaaggaacacaattgctcatcctatagttacagctcaagtttacaacgcaagcatctctcaggtgacagggtctttttttttagacagagtctcgctctgttgccaggctggagtgcagtggcacaatctcggctcaccgcaacctctgcctccaggattcaagcgattcttgtgccttagcctcccaagtagctgggattacaggcacgcaccaccacactcagctaatttttgtatttttagtagagacaggattttaccatgttggccaagatggtctccatctcctgaccttgtgatctgcccgcctcggcctcccagagtgctgggattacaggcatgagccaccgtgcctggccaggtgacagggtcttaacatggaggctttcaggacagatttggtttatgtctgccctggcattcagaaggtgacaagtggagcccggaaggctttcggactaacttctgtaggcccgtgccctctatggccgcagaattggcttcttgttccatgttgctgctagtgctttttgtggccccagccaagtcggttcctatctttggaccacagtggacccatcgaggggctctctggagtcctcccagcccacccttctgtgcctggccactccaatcttgcaggacactgtgctggaaactgacttcaagagtaacactgttgtggctcccacctccggggacttcataggtttgagtatgtgtgtgggaatgtggtctgttttatttactcttgctaatgaggctgaacggagctagtgagggcattaaaacattttagtgttattagttttaaaattagcccgagctgttaaggagagtccctgctcactttgcttatgtgagaaaggggcttctgaatgccaaggttgaatgcccagtgtctttcatcctaaaaaagacaactttatgcgctatgcgttagaatgaacagggaaactttaaatataatgatatggggtgcctgggccccacctcctcctttgcttcactggccctccctggacatcagggggtgtggtttttgcttttttgttttttaagttttccaagtggttctcgtgcagccaaggttgaggcccaccgggctaaactaaaaacgttttccggtgtatgtgggaggcaggtaggagggagggctggcgtgctgcccagctgtgtaccatttcctgcttggtggatgctcagggagtgtttgccagagagctctcatcggatgcttggcatggctagttcagatgctatggacagaggggttcctgtgggaccagtgcttctcagtcctgaaatcatgatcagaatccccccatgatctttgagaaaatacagattcctaggcctcatccacattggccggaacagaacctctgagggtaggaatgaagaatctgttattcctgttattcttaggaatagtgaagcttcccagaagatgcttttgattcagaaaccaccgaaaggggaaaacttgatcctcaattcctaggagtgaagattttacattttccttttggtcatctgatggccctagggttcactagataggccacttactcaccatgtgacccggacaaggcattcagcctctctaagcctcaatgtcatcatttgtaaaatgagagccataatggtttctgcttcctaagagtgtttcgaggattaaatgaggtaatatgcgtgtttggcacattgtagatactcagtgtgttcactgccatcatcatcatcagcactatcattttgtaactcagatagaagctacacactgtaagagcaatttctaagatttaaagagaatgaagtaaaaaattctggctgtgaagtctgaggcaaatctagaggctagtgggggtaaattggttttaaacttgtatctgaaccagaagcttctctggagagagttggagtaagatcacacaggtaatcctcaagacctgtttgttaagagtacaaagccataattgggaaaacagtgaggtcccgattgtcatccagaatgaattaatttacatgcacttatggagtgcctcctgtttgctcagctttgtgcttggtggcatcacatataaaaaggaccaggccgggcacggcgggcggctcatgcctgtaatcccagcactttggaaggctgattgcaggtggatcacttgaatctaggagtttgagaccagcctgggcaacatggtgaaatcctgtctctactaaaaataaaaaaaaaaaattagctgggcgtggtggcatgcacctgttgttctagctacttgggaggctgaggtgggagaatgacctgagcctggaaagtggaggctgcaatgagctgtgatcgcaccactgcactccagcctggtgacagagtgagaccttctctaaaaaaataataataatacatgaaaaggactggattcctttctttcagggaattggccgtctggtctgggaagtacaattagctccctttgaagaacaggagcaggacgagaggatgtgtaattaagtgctaaattgtgtcactaggactctccagggctagatgattcaaggatggcaacacaatgagccatggaggtggctgggggagcctgttgggagagtagggagggatctggagcaggaaactacaagcaaatccaaagagatatccaaggagggtcctgggacaagagtgacggctgagatggggatgacgagcagctgccctacctggatggaaggtgagggtccctgttgtcctggagctgcacagccacttataactggggtcatctgggtctgtggccccctgacagctggtggtagtctgcaggcatacactccgtgtcctgtcgtgagccggtcctcagggcggcatctgcccaggaagccacaggcacacttagcacggcccaagagcactatctgcaggaggcgcttggccccagggctgagctgatggtggttgggtggggtgtaggcgacaggagagcaggtggcctccttcctctgtgccatcgcttagagggtatcggtagaaccctctgtcccagaagtcagctccgtatctgtgggtcttaaaaaccttctgatcctgtaaaatgacatttacaagaatgattagaccttaaattctgtgatcaggcaaggtcttaatttggggccagcagtttagcacagaggcagggcagaatttcgcacagaaggtacctgatccgtgatttgccccggaggtgaaaatgagcaaggttctgttagttaaatgagcataagaaatgcagcagcctcatccgccccccgccaccccaccagagagtcacaaagacgctcattggcattttaaaggctcagagaagtcctgcagaagaagtcctctttagagccctatgtggcctgcaaactgtcttgaccacagtacccttctcacatagtccctgtgaatgttctgggcgacctgtgacccagcctgatctcctttggaaaaaactggagtgatgaggtcctgccagactgagcctgaaggagccttccatctgcctgttcattttccaagccccagactctgaaaggagattcccaagttccccagcctggccctgcagtggtggggagcctcagatcccaggtctggtttaatgttccttagttgttaaccagctggaattaaggctgagaggagactcgtgggcaggctttgcaattgaatgaactatcagtgtggttgcgaggctattttgaagacattttagattgtttctggttcagtaatcttacaaaaagtatgatccaactgatttattaggaaacaatttgtaaactttggttcacttacaagaaagaagtgtttgggtttttgaaaaagatactgcttttgaggctggctgattttcgtgactgactagtgtttatgaactgaaatctggctgcctctgccactcagtgagcctcgcacagtgaattcctagcctgaggcctcattcttgctattaacccattcgccattctctcccactgctgggactttcggatggaggatgcctggcctgtgtgttggcaggagcagaggctgacgtcaggaacataaggtcatgccataattgctgtgccccctgccacccccgccgcctctgcttgctagtgccaggctgcccaagtgctgagaatgccaaggtcactcttccaaaggaggcaggaggcagccgtagcgtcagtcccttgcctcgtccatactgcccatcttcttccaaaggcaccaattattggaagttcctccccttgtggctctggcctctgggacgcctggggacatttccactttgctgggaggggagtgtcctccgggcccctcggatgctccaccagtgagccagggcttgggatgggtagcgtgccaacagggagtggccacttacctttgctcctgtatgtgccctgtccttagaggggtttaaatacatcaatagcttattcgccaaaatgtatccagaactatttttagtgctttgaacatgttgactcttacataacattcattcagtatatataaactattcagtaaatattccctcatgagaagaatggtattttggtctattttgtctctctgccctctgtgttctaatttgggaccagggagcctctcggctccatcctggggttggccgctcccagacctcactcctgctttggctgggcttgctgccttggccatggtgaggggctcttgcggccccgggaggggggcctggtaaatgcagagcctgcatcacagcaacaagtggggagcccaagagcagggtgcagagctcctccttctcccaggacggaggcgggaaaccggccgtgggagcttccctggtcgggaccatgttcccagtccagagggatgtggttgcatgctggagccgctagtatggactcgtgaatgtggcttccggtcacaaaagtgccttccaggtgggaaaatgagtgaggaaacctggattcatttgctgaggtgctgtggcagagcactgcagactgggtggcttgcacaagagaaacaggtttcttctcaggcgggaggctggaggctggagatctgagatcaaggtggtgcagggttgccttctccctggcttctccatgggtcctcacatggtatccctctgtgcgtccgtgttcacacttcccctttctacaaagacgccattcatgttggataggatccgccctcatgccctcattttaacttaacctcttttaataccctacccctaggccagtgcagtggctcacacccgtaaccccagcacttttggaggctgagatgggaggatcacttgagaccaggagttcgcgaccagcccgggtaacacagggagaccctgtctgtacaaaaaaaaacaaacaaaatagtatgctacctctaaataccatcacacattctgaggtgctaggggtgagggctttcgcacatgagctttggtggggacacattcagcccatagctgaatgtccatgcttctgtctaacgggcaaggctgctctgcaaggctgtgcggagtgggcgccgggtggaactccaggggaggcacctcagtctgatgtccaaggaggccccctgtggacgggcctggcccagaaaacctgtgtgtttcccacaggtttggggagatgagttgttctggggtagagacaggtcttgtttgactttgcaccccagttcgtatctgcacatggtgagcgctggcttggcgtctggtgtggagtggtggagagagattgtggaggcacttcttgcagatggcccctgcctctttcctggtgagatgtgggcttttcttaagaaagctgcaacatgtgccccaggagatacttgggctcccttgcccggggtgcacaggacggagcagggaccatttgctgtgtcttctgtcagatctctgagggatgtccctcaggggctgtgaactctggtggaaagtgaaaaagtcccagggtggattccagtgggctgccagccgggcgtgtgtgtgaggcgaggtggagggcttgaggaggtgcacggccccagaagaaagctggagggcggtccagcctaggacacgctttgggcttgcagttcctttccttccttcagggtcaggcttcaccaagcaagccaagggtccctctcacagcagcgacagcagcaacataaatagcactgatatccaacccggcaccgaggcagatcccctaccaccagcttgttctgagagcgtgaaatcacctccatcctgacacgtttgtccccctgtgcttttgctgtgccacctcccgagcagggctggattaactggataaagctggaagagtaagtgccagctccatgacctggccccagggcaggcagcccctgcctcctcctctctgtaaaggcacagagagcgggttgctccaccggccacaaagcacattcccaggaggctctgggcacatccaggcctccttgagggccagccctctgcaccacacaggtagatcccttcctgctaggacagccagttgtttctaaatttaaaaaatgctccttgcatccaaatgcaagagctaaggtgaggtttgctgggcatcaacacctgggcacaaagaacaggtctcaggcagggcaggcagggtgagcagagggtttgggtgagaaaagccgccatgcccgggggctttatgtttttacagagctttcatttctaatgtgacgttaaattcttccctagttgaacacttctcttggtggctggctggcagctgtgtgcgggtgtttgcaggatgataactgcctcagcatccatgccatcctgagctgctgggaggactgctgggcagagactccttggcaggggctctgggaggcatctgaatatccatcttccctgatctcctgtcctgcacacagatgcacacactgcagggctatttctttattcagtttggttttgcttttgccccctagccctccctgtgcccagtacctgggtctaggaacatagaatttaaaagctggggcagattctgagagctcttatttcagtctcatcactttacttgggaggaagctgaggaccagagatgttgagacatgttcttaggacaaagcaaagtttatggtgcagcctcaggtggagcccaggtcccctggctcccagcctggtgctccttcccctggatgacagcatatctgtccttctgttgatttgtcctacctggggtgttttccccatcctcatgtccttcttcagctggacatatttgtggaggtccagacacaactcagtctgggtcatttcttccccacccctcaaaaaacaggttgctcaaggcagatgcagagggtatgcctgtagtcccagctctttgggaggctgaggtgggaggatcacttgagaacaggaattagagaccagcctaggcaacatagtgagaccccattgcttaaaaaatttaaaaattagctggccatggtggtgcatgcctataatcccagctactcagaaggctgaggccagaggatcacttgaacctagaaagtggaggctgcagtgagctgtgattgcaccactgcatgccaccctgggtgacatagcaagactttgtctcttaaaaacaaaacccagattactagtgaggccaaattgtgatataaggtttgtaatagagacacttttttaaggctgaccatgtgccaggccctatttaaatatattactcatattagctcatgtaatcctcatatcgaccttctccactttacagttgaagaaacgaaggcaccaagaggtaaggaacttgccagaagttatgcagctgagggtagtggagccaggatttgagcccaggcagcctcactgcagtccttgagttcctaacctcagatgcctctcctctgaggggagccctgctgtgctgctcatcctgttgagtgacagcctgctaggatgtgaaggggacattggatacttccggaagctgtggtttgactgtgcagatggttgtttctcaggctctggtccatggtgggaagcagtgagtgagcagatcagcccaccttcagcctgtgcgctctgccgtctgacaccttccaccctcagggcctgatcacaggccagcaggcagctgggggccctcttgggtcctctgtcttctcctgagatctctcagagacagcagagaaacgagagaccctggaaatgcctcatagctagtttgaatcctagcacttacacagtcataaagttaagtccttgtggtcttttatcctgtagaatagaaaattaaagggaaaaggtcctaaaaagaattcctcctctgcctgtcccgtcttgcccaaatcctcagaatgtcaatctttccccaaactctgcacactcttcaagcacttcagaaactaatactttggtatatcccaaattgactttcaaagaacgctggataaaattttcttgtaaaaagggtatgttagtcaaaaaaagtttgagacacactggcttaaagtcacgctaaacaagttgatgtgccacaggatttctcaggatctttgatatgcaaatgtccttgggaggcagagctaatccgcagtttggtagaagctgagccccttcccctccatctcacatacaaatgaggaagtgttttcaaggcctgtttgcactgccagtggctgtcatagcaaactagtagcgtccattggctgtcaggaattatgctgttggcacttccccagccccgtgactagccttagaggaaatcaggacccccctcaccaaaaccagagcccactcttagccacctgccatggtctcagctgaagccatgaggcacccctgccagccagttcttcacacctcttcttgggcctgctgttgacttccctcctgtcagctcctgggttgtacccttgggatgtgcaaagctgcaaatctgacctggacgttaggtcattggcccagaggactcagagttgtgttctttggtcctctgggatccagtagggcttcctgcttcactttcatctgctttctctacccagggtctgagaaaagtttctttggcaaaagcatttcattgccaaaaagaaaatctgaaagctgctgatgtagtttaacctcctttatttaacagttgaggcaaattaaggctccaagatgctgagacctgtacaggatcacacagctccttggaagcagctgagccaggactagcacccagctccctgcttcccagtactcatggtctttcggctgcatagctctacttctctgcaaagggtgctggggccgagattcatggcctttaactatggttcttaaatgttactgtgccgcagacccacccagggcactttgtaaaaattacagaatcatccatcttgaagggccagggtcttgggaaagttgcttcatcttttgaggctctagatggagtgttctttctgcgctgctgaacctggagcactgagaagcttttcctgctctcaggtgcatttgaatttgcatggtctgttttacagggcaggaggtgcaaattcctattgcttaagcccacttacataacaaactggccacaccttcaattccaaaaggcaatgcggctgcccactattgcagactatgaaaagtaaggtagaaacaaactctgggagccacagaggctactcttcatggacttatttaaaaggaagacctctggctctttccccagagattatgatttaggaggtctggggtggaagacaagaatctgcattttaaccagcacaccctcttcccacctccacccatgtggttttgatgcagttcatccttggactacacttggagaaatactgacttacatagtaaagaaccaaaactgtgtaattataggaatcactcaaacacccacatgctaggatatgaggctagaaattcaggtttatgattgtccaagtgggttagagaaagaagcaaggcatcttgatttttaatgtggataacatgtagcacaatgatatcatcctgataatctttttaaaattttttttgttattgagatgtatgaatatattatatattttggatattaaccccttatcagatatatggcttgcaaatattttcttacatttaaatctttaatccattttgagttgatttttgtttatggtgtgagataagggttcaacagccagttttctcagcaccatttattgatgagactatcctttctccattgtgtattcttagcacccttgtcaaagattagttaaccatatatgcatgggtttatttctatggtctctattctgtcattggtctatgtgtcttgtttttgtgccagtaccataccattttgattactatagctttgtagtacagtctgaaatcaggaagtgtgatgcctccagcttcgttcttctttctcaagagtgctttggctattcaggcaaataacctgatggaaaaatgggcaaaggacctgaaaagacatttttctaaagaagacatgcaaatgcccaacaggcatattgaaggtactcaaccttactgatcaccagggaaatgcaaatcaaaaccccacacctgtcagaatggctatcaaaaagacaagcaatgacaagtattgatgaggatatgaaaacaagggaatcctgcagggtacactgccagtgggaatgaaaattggtacagccattatggaaaacaacatggaggctcctcaaaaaaatgaaaatagaactaaccataggatccagaaagtccacttctgggtgtatatctaaaggaaatgaaatctgtgtttctaagagatatttgcacccccatgttcattgcagcattattcacaatagccaagatattgaaacaacctgagtgttagctggcagatgaataaagaaaatgtgattttctatatataatggaatattattcagtcttaaaaaagaaggaaatcctgccctttgcaacagtgtggatgaacccagaggacactatgctaagtgaaataaaccagacacagagggataaacactgtgtgatctcaattgtatgtggaatctaaaagagcccaactcatagaagcagagagtagaacatgtgttgccagggctaaaggggcttgggggaagaggtaatgggagatggggaagggttataaacttggcaatctaatgtacagcatggtgactgtaattaaaaatactatgctgtatatttgaaatttgctaagaaagtagatcttaaggcctatgacaccacacacacacacatacacacacacacacacacacacagagggaactgtgttattcagctctattgtggtaatcatttcacagtgtacacataaatcatcatgttgtacaccttaaatatatacaattttttaatttgtcagttatacctcaataaagctgggtaaaactgtaaactatagctatatttaaactacaaaactgtaaaaatataaataaaagtaaataagaagaaagtattaagcatcgccttgcagggggcattgtgagtactgtactgcatatgcctgcagcaatctgcacagatatggcccctgccttctggcgacttacagtccaggagggaagaaatgaggaagtggagcagcgaaacaccaagtagcaaatgctgtggaggagacagctggatcctagtcagccggggaactgcatgagtttccgaggtttcttaaaggtctgtatggtatctctcaccctctagcattttcagcagggagcagtctggtaacaccctagtactacctgtagtcagagacctggtggcctggaagtctataagatctatgtttaaatctttctgtctggtccgcagagctgctcagctcactggttggctacgaagcggaacacttgccatacaaagccctctgcgatgattagctcatttaaccctttaacaaccccatcagataagtagtattattacacacaaggaaactgaggtgctcggagaggctacataactgaacccaagtcagggaccccaactcaggtttgtttgactccagggcctacattctattcccttcagttccctcaacaggaaagatggggcaacatcctgtcctgtcctctgcctcccagttaaaaaaaaaaatatatatatatatatatatgtatgggaataaagacttcttgatgtgtatcaccaacatatctaatttggttttgaatgtgggggaggcaaaatgacattgacagataataggacttacatgaaattctggtttgtttagagatgctataaagagcttggcattgtcgactcatttggaaattcgacttccaaaggagcaaatgcaaagtatttctcaagccccagccctccatttttagatctgaagagggaaacaacaaggtaggtaactgaaagtctggagttgtttctatttagttgttcctaaaggcagggggatggactagaggaaacctgcaagggctttcgactcacagggttctttcattctgtgggcaccagttctctgggcatgagagatgccaaggagctggtgtgttttggagagctcatgctctgaagcacatcagaagaaccaatggttgccgcaagacccccttcctaatgcagatggagttttctgtgaatcccggaaggtgcacttgggtgggagggagttgaggggtagaaaaaggaagacagcccctacgttcagcagaacccagggctgatgtctgcaacagcataaagtgccttctagagtctaatcctggtcatccgtgtagcatctcttcttctctaaaccctcatcctaggctttctttcacgcttatggccacacacagtgaggctttcctctctgcccggaatccacagggcatcacccttcctctggagccagcttggggctttcctgacgtcagtagttttgggggaagccagtgtcacctcatctctgtcttgaagcatatttaactttcccaaatagcaaactctggttctttgagcaaatgacttccagatgctggaagcagcggctagtggaattttattgcccccaaactgtggttctgggctgcatacttctgacatgaaggtaatttggaatgtaaacattgcaagacgtgtgctggaattaattaaagcagccctgtattctctaaggcctgcaagcctgcaattaactgtttacattaacaccaagccaagcagatcaaccagaggatgcagggacccttgattttcactttctccctttaccttcagaaaacagtgaaacgggaaccaagctgacccatttccacagtcccaacctgagaagaggctgcttaagccatcctctctcgcacagcaaacaggcgacagcgtgagaagcctaactgggcatcacggggaaccaagggcaggcaggaacctcttccgcgatatgtcagacgtcagaggcttctttagccagaaatacaagtgtgcccttaaacacgaatggccacattcatggtgggcctgcagagaaaaaccgtggcatctcatacttgcctgataaaactagaaacagcttttgagaataattttgtaacttcatcatggcatttaaaagtagcatgaaagttttggagcaggatggtgatgatgattgcataataacgtgaatatacttaatgccaccgaactgtaaacttaaaaatggttaacatagtaaattttgtgttatgtatattttatcccccaaataaaagagcagggtgttcagactataaaggctctttgggattatgtaaactaggagaacccctggaatagtcctcatttatttcccccacgtaatacaagagggtgaagttctggcttcctgggaacaggcccacacaatgtcaggatatttcagggcatttatgtaaaacaccagaaacccatgcccctggagctgaccaatccttcacacccgctccgagtttgttagaggggtgactcttttggcagggagcactgagaaatgctgatatgtggttgccttcactattggctgtaactatgaaaagagttgctggaggctacctacttaccctctctcccccaaaggagaaagacttcagtatcctgcagcgtggcagtggggcaggcgtgcgggtgtgcacatgcgagctgttctgttgttgagactctagttgttgccggttcctccctctttatatgaagcaaggcaacacccacaacaaagcactgtaatctctccattgaccatccttctgccctcagatcaacacaagggccaattccattccaacagcattatacgactttgaaaatactctttgtgtcccgccagaacctcctcctcttctcttcagtttcttcctcatatgacacagcttccagaccctaaccaccctgggtgtctgctttgggtgtacagtagtttttcaggataatgcccagaactaaacccaatactaatagtggtctgctcagagaggggtatgggaattttatcatctgttctgttttgacttccatatgtccaacattatcccccaatgttgcatttcaaccgtcataccatcctttccttaaaaaagcttgtgatcatctgaagcctcagggattttttttttacatgaatgactgttgagcaagggctccccagtcctgaaattaggtaaatttatttaacttaaactcagaaatttactagaaatcttattcattatgttaaaatcagggcctttgatatccagatactgagtcctgactccctcacccactgtccttccctagctttgggtgtgtctatgtcttcatctgagttagaattctatatagcagaacttgattgaaatgctgtacagaattggcctgggagtacagagaccaccttttcagtttatatcaatcagagtcatgtgggtgtggtaaggccgccctgagtccacccagccaccaccatccagcttgggcttctccactttgctcccaaggattgatggagagtgtgcgaggactggttaaagagatgtatgctgtgatagacagggcaggctagcagggggatgtggtgcctggcatgtggcaggcatccactacattctgcgggctgagatggtcaaggtcatccctagcctccttgcaggtgatcattcagacttaacttcctccccacccaaaaagttgcctcaaaactgctcacaaagtgggggctttgagtttaatttctcctggagccctctggtaggacacgaatcagcaggaaactggcttgcaggtctttggaaagagaagtagcctaagattaagggcctagaaaatcccccagaaaaaaagagcattcctataatcagtgaggataaactaaatgacagtttgggacaacatttggtttccttggttcatttaaaacattgattcagagattggggactggcttttcctgacttaaaagcagtggagccctttccctctaatgtggacacatgctggttccctccctgccttagggaaggagtcggtcaggttggagctaagagggcccgggagggtctttcttggtgaagcagcattagccattggttgagactgaggcagacagggttttagctgaaaaggcttttatcgctttttatctattgacactttttcaattaaggagtctcccctgagatgatctatcgcctccctgtctgagcaggaaataattaccagcaaagcagctccatcacctgccgcatgttttcccatggccagggaggctcaggaaaatatcaacagcctgcctgctgctggcggtgcctatgtgggcacagggcacacggcctttccagatggcccagccctttcctctgtcttatcctcccccccacttcttattccctttgaccaaggtttttatattataccctgtcaccatcagggaatctagccacgtcaccttctctcctgggcacctgctcttctgaggagcttgcagccttctaggctgggtccatgcctcctcttgttccagggccccctatactgctcatatattcagatgcccagggacatgttccagcggaggctacccaggataacatttctatctcactgaggtttttttggagccttcaaaattccatgatctgatattttaaagtaaaagctttaaatataaatgtcattgaggtacagcacacagacggcaaaatgcaaacattgtgagtgcacagcatgaattctcacctcgtgcacacggctgtgtcgccagcacccgggtcaagacacagaacgttactcacacctctcgtgccccaactagtcactgcctcccttccccaggaaccactgccctgactcctaaatggcatagatccatttcccctcttgttgtacttgatataaactcatgaagtctatatttttgtctagatttcttgactcagaatcatgttcatgagattcatccatgcctgtagttttaaagttgttcatgttcatcggtgtatagtattccattgttcatgttcatcagtgtatagtgttccattgtacaagtgtgccacggtgtttctacccattctgtcattgatggatattttctgtctttttttaatggagaacatatgcatgtactttaattacctgtaatgcctaggagtagaattgctgggttgtagggtgtgtgcctatgtttagctcaattattgccagttttacaaagtggttttgcaactgagaagttttttcaatgtagaaaatgtgagaacatttatctcctcagcccctgccgacttgcctttatgaaagaaaacacagaggtggggacttgtgcaaggtgaggactgctatttcttgattcctggcctagttgcctttctattagcctgcaaggaacctctcttttgacggacatgagagaaaaggacacgtcctcctctctcccgggtcacactttcccccaacccattctatagctcatataattttccacaaagtgccttatttgaacttcaaatcttcaaggccagatgagcaccacagacgtggccttttcttgtttatccagagggtttggggaagcacagctccctgacattcattgatggatatcatctgcaaccgtctgctttccttttgtgccaacaatctgggcacgagagagagatgagtgtttgcttgagattgaatttatgacaacacggaaccagcctccatcagctagactgatgaatgcctgggtgaacatgccacagtttgtgttttttccccttctagtcgccacctttcttgattaggaagctgtgttgtcagtgtgctgacttattagggagaagaatgggctctagcaggcctttaaccatcacagttctcattcaggaaagaaacgaaggcaggtgttgtacgccccgtgcctcccacagagtcccgcaagctgtgagtgtcctcaaaccatccatccatcctcccttgaagggcttgggggaaggggtgtaaaagggaagaaaaaaccctattaattgtacgcacattaagttctaggcactattttaggtgcgtgtgtacaatttccggagcaaatgagtgaatgaatgattagttttaaaatacaattaagagttttgctggcttccccagaacagaaattttctgagacttttcctagatcacttttagcagtaagagtgccctaagaataatggctttttggtcaaagtctcttaatgtcactgaagcttgggaacatgttctcatcgggcaagagaacaacaacagaaaggaactgcattccagttccttgtgtataaaggtgctcctgacctctttggccccaactctaagggtaagaataaccataagttattgccagagggcagcaccttcatggacagagagcaggtgtttgagggtcccatgctccacccaggaagctgctggctccactaagagaatgggctttgggcctgttcagtttctaccaatgtggggcaggcccccaaagctgaacatagatggagacacagaagggcagaacagttaaaaatttaattccacctttgccatctcttatctgtatggtcttgagaaagtgcctgtgtttctgtgagaccttggtttccacatctgtaaaatggggagaatcatacctcccttattgggttgttatgaggattaaatcagtcagtgtatgtaatgtgcagggcatgtggtaaacgttcaagagtgtaggctttttgttattggagaaaacatttgtcaggtatctactgtatgcagacagaggccagacatgccttcaggtacctgcttcatgcacagctgaagctgacacatagtgctcagttagttacttgagactttgctttagctgacaaggaaagcccttggtcatcctgtataccgtgccaggcttggtctcatgaataggtggaatagcatgtatatggtcactgagtttcagtggagaccccaatggccaaaaagagaaatcccacctttcttgttgatgcccaaacaccatgaactcattagttcaccaacagaaaactcccaagtatctgctgaagttagggcttgtgctggcagcctgcgtgactgtgcgggtgtgtcctatgaagagctgatttgcagtggagacccatgtgcacaggcacaaaaagatggccagggacctcggggagaatgcggacactaccggctgactgctggtgagacttggactgaatgagaatactcatgccaagcacccagcatagtgcctgaaacataaaaggaaattatctcagacctactaggattttcttattaaacaaaacaaaacagaaagcagaaaacaagtggtggcatggatgtggacagattggaaccgttgggcattgctagtgggaatataaaattgtatcatttagaaaaatggtgtggtgtttccttaaaaaattacaaatataattctcataccatctaacaattccacttttgggtatgcaccctaaagaattgaaagcagggcctcaaagagatattcgcacacccatgttcgtggtagcatcactcacaaaagccaaaacgtgagagaaacccaagtgtccttggacagatgaatggataagcaaaatgtgaaatgtgattgcaagctttaaaaaggaatgaaattctgatccatgctgcaacatggatgaacctcgaggacatgacgcgaagagaaattagccagtcacaaaagacaaattctgcatgactctatttgtatgaagtgcctagagtaatggaatttatagagatgggaagcaggatgacggttttcaggggctgaagggagtggggaatggggagctattgaaggagtacagagtttcagttttgcaagatgaaaagccttctggagatcagttgcagagcaatttgagtgtatataacactcctgaaccacatacttatacatggttaagatggcaaattttaatgtattttcccacaatttttaaaaataattaaaaatttaaaaacacaaaaggaactcaaatgaatacttgctgtatctgaatccagatgaacagaagaaatccctccaagcactgtggccctgcgcaggccagaggctctggtggcgattggatgtgggaacacagtctgggtggagaggagatttcaggagagaagaggaaacggcgccatctccttcatttcataatcacactgaaagcagccctgggagaggtgaggatgcagtggcttgatctcatcctaaggaataaataactggcatcacattttaattagtggagaagctccgggagccaggcctgaggaagtgcgccttctgccggtgctcagaggcagacggggagagcagggggcgagccgagggtccaggacatttgaagggtggtgggtaggagtggtgctgcggatggcttggtctgaccggcccagggtttggaatagacagagtttttctcactcagttgacctagttgaccttcccctctgagaaaaattcgtgaggcatttaaagaatgatctttgcgccccttggcctgggcgctctccttctggggcgggaactcacaggatgagggagattttgttggagctgtggagtgtaattacaggcctgacaggtggcaagtcagagggaacatcttactctgcagccgctgaaacaatgattttaagcaaggcgacagcggagaattctccctattgtgcagggcaaccctgttgagccataagccagcaccacatccccagtaaaatcaatcccagtggtggaaggaggcctccatccgttggacctggcacccagcccacattgctcaagagctgtctctgggcctggtatatgctacgccctgtgctacgcttctgtaagcatatggctcctgccctcaaggggcgcagagtctagagaaggctctgctaagggtcccagaaatcagaggagtcaggctgagtgctgattcccagcttggaggagtttacagatcaccagacaggcaggcgccacacggcacctagaatagtgttgggcacggactaggtaccaaagaaagagaatggagggagagagggaaggagggagatggcatggggatggaggatgggaaatagggcagggagacagaaggtgggggacagggagtgcggggctagaggagcgggcagagagacagggaaggagggagggaggtggatggggagggttggatagaagagaatggagagagagaaggagagggaggagagcagggaaggaaggaaggcaggcagggagggaggcctactcctctaaatcctcaggaaaaggactgggaagctcagagttgagctccttttctgacaatagtggtgtttccaaggaccaatctttactctccagagtggggcttgtgagtctctcaccccagctgtttcctggggctgtgaagttcatcggctccttttcctaccccatcacctacctgtcacctgtcctgggcaggcaggggtccccacatatcactgcaccctcgtgggctcccctgccctgtcctggcagtgtacatgatgagcagcttacatgatgtgtagtgtacatgggggcggcgtgcatggtgggtggcctgtgggggcagcgtgcatgaaggcggcatgcatgggggtgccgtgcatggtgggcaacatacatgggggcagtgtgcttggtaggcagcgtacctgatgggtggcgtacatgggcagcgtacatgatggccagtgtacacgatgagcagccaccatgcatcaggaggaagagacctcgctcccacgccacagccccaggccccaggcccctgacaccctggctccgaacccccagcagccagcgggtgggttggattccagggtctccactcaggggcattgccgggtgagcctgagataagggtgtagctctgctcatttctggaggtctccacacaccctccgggcagacctcatcttcttcagacatttcttttactctttggcttgctcttgctgtgtattaaatttgatctggggtgtctgcaaatgttggtgctcacgggggtgtgctgggccgggagaggatgagcattcctcaagaagggagacagcagagcactagatgggaaggggctggaccctgaaagagcctgccaggtatccccttctagcaggaggggcccccagacatttcacttcattccttaggtgtgagtcatgttcacatttcagggaaaatgcacatccttcccagagctgaggaagccccatgagctattctggtcctgacaccggctcccaccctttaaagctcctgtccctgggggttttgctgcaggatggtctctgaagtctgcagccaagtatttcccttcccttcttagagggccacgtccctggcctcttctccagccccggggattcaggccattgggtgtgtcccctgcctgaggataagccacagtgttactgacctgggcccctgactccaaattgagcattagattgggtttccagtggttggtcagtgccatgaaaatcttggacttcaggtcctgtgggatccagctaccctcatcctaactccctcctttgactttattccaggctgacagagcagcctgcagttccaccctctatagctgcctcttggccttgcttttgtttaattcccatgtatttgttgaatatgtatgcatattttagcaaaaataaaaagtaagcagaacccaaataccaacacgtcctagtccatcaggtggcagtgtatgtgctctcagtctgagaaatatacacaagtcattaaatagcaattattgtaattagcagaatgtacacgtgattaatcaccctctgcccccgctcctccatttaccttgcctgtggcattagtggataccgtaaggggctgggagccagcttgtggtatagaggaaggagaaggggagggctggtttctctggggtttcttttctctctgggggtggatggttctttctgtgttactctggaccccctccaaggccacctcttctctcctccctttctctgtgacccatcccaaaacacggcttccctcaagaaaagctctctattaaatcagcagcttggaggtgtgcagtctcagccaggcattcaggccaaggcagctaggggtaggagcaggagacaaaaaggatgaggttcctgggtgcttggaaaccctcattccctgcacctatggctcggggatagtcacaggtcctgggtgacctgccagacaagctagaccatctacaaccctggggggcccagaggaggggcttccatcaccacacggatgctgcagcagcagctgtgtaaggcaatggatggctgaggctgcagcctataatcacgtatttacagttgctgcattatggaaaattaaaggtgtgtgaggcacagcctcttcagccaacagaggctgtctgcttgggctcagctcaggcagccagtgtcacctgcagctggaactgcttcaaatcctcctacctgtccaggggaggggctttttctggcttccaaggtggtcgttgggggggtgggggaagagcaggtgcctgtactcaccttggctcctcctttgttcctgggtgggatggatttgttctgttttctgtccacctgttagggcaacatagcttttggagtcccattttgagcaaggtgcattagcctggctcagttccttatctgtaaaatgggcacttgtacccatctcgtagggctgatgggatgattgaatgcaatactgcttagccttgtgtttacattaattagtttattaattctggtggtttgataaatattgagcacctacagtgtgtcaggatgaatgactctaggctctggggataaagcagtggctgagatacagcttgcatttagtggcatgtgtgagcatgtgtgtggggagaacaaacaactaagcaggtaaacaagtgaataaacaaggtaatttcatatagcactaggtgccatgaagaaggtaaagtcatatgggctgggaggtgcgggctctgagaaggtgacatttgagccgagacttgaatgaggatgaagtcctagccatgtgaagatctggaggagaagttgccaggcagagggaacagctcgtgcaaagtccttggggcaggaatgaatgaagtctgtgattatgttgtgatggcaactggttccttcctcgaaggtaaagtctggatcaagtttgcattaaatcccaaggtgacctggtggtatacatcagagaatcttccacctgggagtgaagggctgagttcttgggaggtgtcccagattagcctgatctatcagaactagacgcagctgctgaggctcattattgtgttcaatagccaaaactaatttatttatagggcattattaagaaatcgatttaatttgcactttgggtcaattgagttgcttcacacttgtgtgtgcacattgtttatctttacaagttattttccgtgcacatgtgcctgtgtgggtgatgaacaaggagaagtgcttgagagcccgggaaaggcacatctgcctacaaggtgaatcgggctgaatcacaggggcactggagccacccccagatgaagacatctattttcaatgaatgtagtaaagcttttcctaacttcagaagccagcaggtggactaagggctgggagggcccgagggcctgcccagcacattgactctggagactacgcattgtatattcctgccaccgtgggagactcccaatggccaccagtggtcatgatgcccgggcatgtgtggcgctgtacagtcatgaatcacttccatctgcacgatctgcaggctcagaacagccctatgagaaggcaagagagaaatcatcttctccattttacagatgaaaaatgaggctctgaaaccttagtggactgtccaggctagaaacgggaccctcccaaagtcaggtgttcctcccccttgcctccctctctcccttccttctgctcaccccaaatgctttgttgagccccttcttaccatgccgcgttgcacggcagttatgctgtggcattgccacctgccagcttgcctgggctcgaatttcagctctatcccatagcctgttgcatgagcatctgtctcacgaggttaccttggaagttaagtgggtgaatacatggcaggtacttagagcagcgcttggtccatagcaagcactccacaaacgtgagtggttgggtgatgaagtggccctccgcctgcctgctgcaccacgctgtcccgacgctgtctgttctgaaggtcctcaccactccccatagctgtggtccagccctggtctctgaagttcttctttcttgtcctctccatttacctgcctgttctctgtgacgatcctcaagccctatgctctttccccatcttctccctccccgccttcctccttccttccctgtttctcctctcttctttgcacacacgggagacagccagacacggctgtagctctttttcagccgaccttgcttcctctatctcaatctggtaattcacaaccctaaggaaatttgaagttctgaagatgttctttaagctcacaatccagaaaataataattttttaaaaagtatttcagcagccttcactggccacaatgttgaggggctctgctccccctggagaggtctctctagcctagatatgctggggttcactgcctgcagctgcaccttggcaaagaccaagggaggaagttgggcctgtttgtggaataggaaaatagtggcagaatctgagaggacggtgagtgtcgccatcagaataggattagagtagacccacataggaggcgggatcttcagctggccccaccacacctacccctcaccaccctgtcctcccctgcagtgcccacacactgagcttgctgccctggacctgtcccctgcgaccctcaaaaaaccagacctgaggcagcttccatccctgcccagtgacagctcatcccacagtttatcttctgcgagctcatgcttcctgttcctgggttgtagcccagcacatgaccaggagatttggggaaatggtgcattaacttcagggtgggtctaatggaggctgcgtagggcattgtgggagtccgtgcagggaggagcttttggtgggggagggggttggggcagggacctctgtctctgtctggaatcagaacctccccctggttcccagcagagcctagacggatgggggcgtacagtggggtagtggtggtgagtgaagggcatggagaagatgaaatctgagtccttccattccagttctccatcgcaggagccgggtctgtttatctggtgagtctggctcatgtagtcagtctggacatttccatttgagaacaagccagttggctctatatataacccaaatgtccagagaattgtcaatccttcccttcaagtctaaaaataggagagcaagtcccagttctgatgcttaaagatgactcactctagccactctagcctcagtttccctcaaaagcccgggggatggggctgacacctcagggcttccatgggcctggcacaaaacgtgaaaccacctcacagggccacagacacttagaggggcctgacaagtgttcatttctcgattcattttgctttggggagattttggattttttgtcatctcatttctctggaccaagaagggacaagccgcgcccttgctgcccgaatctccacctggtggcacctgagtttgtgcccagatgacacgctggagttgtcctgtttttgtccaagaccattgcacacatgcctgaggaacacacagcagccctgggtcccgcgcttgcactcggagctgcccgggccccgcctccccaggagaaaaggctccctgagctgcacctgctggagcaggcatgctgccaggaccctgatgtttcagctgcttctctgctctgtgattctgtctgaagtaggaaatagggcaggcttgctggtagactccagaggtcattaaaaatatgcaaaggaaataaacaggcctccatcaatcacttccttggcgggcttgcttggaagggtggctggggaagggcatgctgggtctggggcacagagctgggcctctcggggggtttgctgtctgtcttgctctccatgtgatgaactctgtcaggaaaatgccatggagtacctactacgtgccagggactgcgctggatagctttctgtaagctatttagtcgttactgttgcctggcgaggagtgaattactgtccatttccacagatgagaacactgaggctcagagaggttaaatgactgacaaaagaggttaaatcacacaggtttagacccagctctggtttcaaagctctgcctggacctgggctctctttcccaaggtctgtgccagccgagagccctctgcagtcctgtaaagcggatgagtgtgccgccctaccctggctcccatctcctatgctctgtgtgtcacctgctgtccggaggcacccaccctcactacagcccctcctgggcaacctctgcccaccatccatactatctggtctcgagacccatttcctctgagctgctctcacattggaaaattatccaagaaactctctgatacagtgagaatacctggtcgggaaatagtagattagtttactaggggagcaccttgttttcacagaggcaacgtgttttaacagaggactcctggaaccaatcctaagaagtaaatgtctaatagttgaaatttgttctttttgggtacatggtatatggtttattggaaggaatatcggctgtagagttacatatcaaatcccaaccctcacttactcgttgtgtgaacttggacaaattatgcaaactctctgagctcccactgtaccatttgtaatacggggataagtgaagttacgcacacaaagtgcacagcacagagcctggcattcagcaggaccatcaataaatatgagtttccttcctttccctttgagggcaaacaggttttgctgctttccttcaagtcatgtaatagccaccaacttcacttatgcatcagcccagccctggccatgtagacaaggtggtggtgttctgtacctttcgtgaagggacactcaggccacgagctctgcggacagcaggaagttttccctaggccagggaggaagagggggactgaaataggacttccttcagacatcgccaccagccgctactgtgtgtgcgagctcaactggcttttcccaaggggcccttcattccactcacggcaaacatcagcctggccagccccctgaggacggctgtgaggaagggcacacaagggcctgcagaaactctgggggcagcagggggaggcaggactcacccacatttcagggggagcgtttttgttcttcatcatcaatttttttcagaagggcttttgaggggtggactaaaggaggcagggagagaaaaaggaggatgacgagggaggagagagagagcagagaaatggtgcataaagggggcagatagttaggaggataaaggtggacggtataagctgcccttcattcagagggaacgcgctgatctcatgttcattaaccatcagctgggaatcttgttaaaactgcacattttgaaaacttaatgcaaatctttgaactttgattcaataagtctaaactagggccctaggaatatgcattttaaccagctcttctagcaatttggatgtagatatttggagaccacactttgagaagtacagaaccttcagctgggccctggaatggagattctcgaaagtcccaggctcctttccctggtaaaagcagattctttatctcattagaggggctgccactgcccttggactacaggagctattttccaggaatgtaatcaggcttgacccctgcctcctagctctcgccatgctgtgtctcctagtaaatacctgcctgcaactcttggcattgtttttggccttgagggcccagcctgtatttcaccctgttctcaaggcctggctgcattgatcagcccactggatttactgcctgaaacaaagcttagcgtgatacttgatcgatctctcctcatttcatgtcactcagaatggctcctgctggaaggtacctgagagacgatctggttcaattgtccttaaccagggtaggcatcaacaactgcttgtgaagctttgtaaaaataggcagggccaaactccaggaggctcctgatttggtgaacattctctctatagtgccatggcagatatatcagttaccctctagtattcattcttgcctccttcttcctctgctgggaatgtggatgtgatggctgcagctttagttgccatcttggaccatgagtaggagatgatcagctagtgagctggaagcatctggtgtccacagactgagtggagtagactgttcacctcggagttttacataagagagaagaaatgaacttctatgttgtttaattaacaaaaaaaaaggaagcccagacctgctccttgagattgaggtcctggatgctgaattcctgttcttctcaattttccgctagctttgtaagttatttgcaggtaactgctgtacgtatacttcctttgcagatcttacgaaatgaaacacactgccaggcatctacagtcaaacaacaaacacttagctgactgagcaagtggttgattaggttgcctatcctcccctttctactcaaagaaaatggggttcattggtagcgtcaggaattctgggctttcttcctgattctgattctgatttcgttctgtgccttggcattcactgtggtccacggtagaatgacagtctttaaccagacgacctccacactccatccatttctaacattctgacctaacggtagttctgagaggtgttcgtgtggtgtgagcaggaactcggaatacgtgaacctgattggctaagcttaccttgtggttggttgacaaatgactaggaaatggatggagttgagggttgatgcaacagcgtaattacaaggaagatggtgaacttggaaggttgccttgccaaaagcaaaacgaaaattcagttacctcattataggtactcatgaaggaagatggtgtcagaggaaaaatcggcatgactggacctgctgaggtgaaatcactgggaggtgaggttgtacctgaaaactggacctcagtggaaaaccctcagatggttcctcaccttacttcctccttcacctatggcctgttctcctgaatatccagttcaaaagatgagatcatttaattactctgtaggagaacatatcttccagatgccctagataggggggcagttctttgcagaggaagattttgatagaacttcagccaaaagagtagtttcattagatctgtcaaagcggcaaggctgctggctccttttctccccgtgcactgagagtagagagggtgctggctgtaatatctcttgccccccaaatgatccttgagctttcaaggttcacagaaatttcctggatgccccagttctttcttcttagtacctgggtagcagaacctccctggggatactcagctccctttattagagagcttctgcccagtgaggctttgtgcccaggtttaacataagttcctggggtgctgtgatagcagtgaagtcactaggattctagcatttttgcccccttcttttattttaatttgtccaaaggtgtgacttagtactgaccccagaatgggtgttagaatgagctgaagcgatgggtggattagtcaagtttagctccaaatgcagccctgattgtctgcttttgttcattctccctaggaaaggcattaagaaccccaaaagtgaacattagtgaattatcactcttcagaccaactggagcagcttcagtatggaaaacataggtgggcatgggcttgatagatgagttttatggaagctgagaactgaatcaatgaatgccacttggtctgttcttgggccatttattcgccatcttggtgcaattagacaaggatgtctagatgggggcttttactgtgtcagcttcaattagcaagtcatttttagttgttgctaatgcatcttctttattgtgccattgatcaattgcaacattcactttgacagtgtgggtagacaaggccactcaaggcagcctccacagaatgactaaggagcaatgcggtgtctcatctgggaccaagtggaatttgtctgtgtaataatcaggtgaaattgagtactgcttgttgtcacccttgttctatttttacctctcggattgattttttcaggatcaatgacagtatgggcattaacaaaatttgctgtggatgcctcctggttttgtgatagataactaaagatagcaccctgaatagcaatgttggtatacaatggcttcctggtcctgttggccacctactgagtctacaaacaccgcagatcgatgctgctggtctaatgactgcatttcagtctccacccattttctctaccagtatcatgttcttttcctgtatgtaactttggaatggttttgattagtggaataacagcatcaacagtttctaccgttattacaatttttcaaacacatggaactctgtaatgcattagccagaattaggtgctctgtcttgacattacctagctgtttgccctactcaagcccaagtgtggaaacttgctcatgaggaagagtcccttcacctgcagtgtcagtgcaccaccagccaatgcagtgagggccgatgcctgtccccatcaatgaacatcattcctttgtgcctcttgtcaagcaagtgcatcctattctgcacatgccacatgctctatcccgacttgtcactttaggctcttccagtctaccccccaaaaataataataattcttgattttagcattttggcaaaaggaaccgtttttgctgctatagatgttgtgtggttgtgtgattatggggacatggtgaagagtccagtgtgcactttatgaagttcacattagaggagaataaagtaggaaaaggggaatgacctaagacaaaaaacaagtggcagctgggcggctgtgacttcactctcatagtccttgtagtgaataaactcccctaggaaagggccgtgctgcagaatggcagccacttcttgtgaaggccatgacagctggattttgctccaggaggattagaggtctgttgctggaacagttgagccccagatggaataacgttagttggtttacatttaggggccgtgttgtttgaaaatacatatctttaaacactggaaacccactcagtgtggtgaagaaggccacaggaactaagaaagacaagctgaacagctgtcggggtctccccactcacatggggtggacatatgctgagagaagggtggatggtaccacacatcctgtttgaattgcatcctcccgccctctcaccttccctccctctccttatctcatagaggaatttgcctacgtaggtcaatgccatggggcttgacctgagcatgagatgccggggaagacctgcgttctcgtaggaaatgtatcggtgtgggaggcctggggtacgtgagcttggaggatcacctcatattgctaagcctcattttcccatctgagaaataaacaagttaacattaaaaacaagataatttgaaaaagaataataactaagatttattgagttcctccatgtgctaagcactattttaagcatttaagtgttttgactcctttaatactcatgatatcctgcaaggtaggtgcactgattagccccattttacaggtgggaaagctggcgacttgatttgaatccaggcagcctggcttcagtccagaggccaagtgcttagccaggatgctatttttccaatgtcctaaattatgtgggactaggagagaaaaacagttttaccctgcaacctttataaagcccacttggccagatggagatacaaaaagcaatttctaaaaacaacaatgataaatcagtgatgaagggaaggattatataataaatggtgctaggacaattggttagctgcttggaaaaaatatcaaagcgatttggatcctcatctcatacagtttgccacaatatattccaagttgattaaatagattaatggaaaaagaagaagaaaatagagtatcaaatgtctgactgggggaggactttaatagctcaaaacagtgaaagaaattacaaaaattggggatagttacaactttaaaaaactggaagtctctgcatcaggaataaaagagcaaacaataaatttgggaaagtacttaccacgaatgtagtatttttccttaatatccatatttaaatatgtatctaaagaaatgcgaagactctgatagacaggtgtgcaaaggagccgtatgataccctaataacatttggaagtgttcaacctcagcaataatttaaaaaattctaatttaaaaagaaataccatgttaatatgattatatttattcatctatatcatatgtacatgtatggatgtatatataatatggattatgtacatacacacatatgtacatatcccaactcgagagctgctgaaaggacttagaaataatgacacccctagagcaatatgtgagtctagcatctagattttggtttctaatattgtgctttactgaaaggaatcaaaggcaaagtcagcacaagagagcttcttgctacatctggtgccagaaagtcatgctctcagaaggacgaggtcgtgtcaaaggacacagaagtcccatccaagagcttcctactgcctaaatcccggataattagagcatcaaaagagaggagacattaacagcttaaataagaatccatgagtctataccgacatacggaagttagtgaataaacggggcagaatgaggaaaacttttccttaggacataatgccaactaacaaatgtggacacgccacccaatgtgatatcccaagatggacccaacatcacttccgtggtgctcctgcccaaaatgcgtgattctgagctaatcaggaggaaatattagacaaacccaaattgagggacatgctacaaatatcctggcttgttctttttaaaaaggtcatggtcatggaagacagagggatggagagaactgttttagattaaaggaactaaagattaaaggaactaaagaaatatgacaattaagtgtaatgcatgacttaggttgaatcctgaactcccttttattaaattttttttggtataaagggcatggggtgaaatttaaggcctacagattagttacagtactgtgtccatgttaaatttcttattttgctcatcacagtatatgaaaatgtctttgtttctataaaatacatgctgaagtatttaggcataaaggacatcctgtttggaacttagtctcagatgattccaaaaaaatatatgtgtgtttatgtatgtgtatgtatgttacatatgtatatttctgcctacatacctatctattgaggaataataaagcaaatatgacaaaaatgttagcaattggaccatctaggggaagcatctatgtgagtgtctttctctgttcttgcaacttttctctaagtttgaaattatttcaaaataaaaagataaaaagaaaaaggcaagtgccctattttgcttgttgatgaataaggacaagccattgaaggagaggatgtgagtgtgtagcaggaactcctaaaccctagccacaggaaagacttggccagacttttctggaatgtaacttggcaatttgtattaagaatcttaaaaatatccataacttttagccccatttctgctcaaataaaataaacaaaaatgcaaagacgtatgcacaagtatcttatgacagtgtgacttccaacagtaaaatattggagacaatttaaatatttaacaatgggggcctggtgtagccctaccatggaataggatgtgcccatttaatgatgtctctgaagagtttttaacagcatgacagcatgcttaccttatcatgtcctgtgaaataccagaataaaatgtacatgcagtagaatctcaattacatccaaaatacgcattataaatctggaagaaagtaagccaaaatgtggagtatacttggtagcatttctccctactttttaatatttttttagtaatatcacattttttatcataaggaagtatcctaaaggcagaaaacaacaaataaagtagcaatgaagttctgagtctttctgtgactgtgtgacgacagtgtctgaacagttatccctccggcagtgacgagcagccccttggacatgttccagtcccagttcttcagacttcagaaagtggggaagactccgtgggggaagaggaggggttgctgatgtcatggtgacaacgtggagtgtggcacacctacaggtcttgatgggctgtgtgctgggcactccggaatctcatttaatccccctagtggataaggaacactaagtattggagagacagaatgatttacccaaggccagtgtgtagtaagaggtgcggctggaattccaggtgagattgggagactccaaaacctgtgctcttaattccagccctgcctggcctcctggatcatgcccatggtgggtgaactgggggcgctggcccccacgctgccatcctgacttgtcagcctgtttgcttcctcctctctgttgtgatttcctcaagcttgttattaaataacaagcatccttcctgcgttttctcctggaattctcatcccacagtggcctaaggggaaggcaaactgtatgcctgtgcataggaagcatgaccgcgccatccagcctccttccagtagcagtggatgcagccttgttagggtgattctgaccccttgttctccgtcacctcacaaggcgtaacgacaggggacagctgcagagagagatggaggttggcattcagaagcctttctgacagcaagagtgaatcaacacaaaatgaatcacacaaagacaccattcactgtctccccagagagcctggagaagaaatgcctgccatttgtgtagctctttttgatgttcaaagctctgtggcacacagccctccttagggtctcacaagaactccctaagaaagacaagacaggaattacttcccttaggaaaggaaactgaggctcagggaaatcaagttacttgcctcccgtcattggtgactaggtcagtcttctaacttcctctttatcccttcttactccttctgcaaacagtacgatgctgggcagagtggaagatcccttattgtctcaccctggggcaaggagatgggctagatcattcctaatgctgcttcctgcctcagaagatgaatttgcctacaagaggtgggccctccatgcttataaatccttctccttcaggttacccccacctagtgaaaaagatttacacaaggcagaaagtgggtggaagccatttggccactcatgatgtcttattctagaggaggccccctgaagtgaaggtgccacagcattactgcagttcagcagacatttaccagcatatgccagtcactctactggaactgaggagagagaaagccagggaaaaggttgccatgggttgagtcaaaagaactcattctaggctcaaaaggacaggagcgctggttcattaggatgctcaacttccaactagcagactgggcacatgtcctagagaggaattgtgctgtagtgaggcgaagtgggcttggatgtctggcaagtcatggttcagatactgactccagccaggcacggtggttcacgcccatagtcccagtgactcaggatgccaagacagtaggatttcttgaggccaggactttgagaccggcctggactacatagtgaggccccgtttctacaaaataatatttttttcaatgttgactttatttcttagctgtgtgacttccagcaaattctttaacttcattgaaactcagttttttcagctataaaattaagagaataaataaactgtcccattgtatgatgcaaggattaaatgagatgacagcaactaaaggcctgccaccatcaactcttggcaatttatttccctcctaaattagatagaaatgtcatggtttggggtttccattgtgtgttcaagaaagataagaccgtaacgcctttcttaaatgtctaagcttcattatcagagcttcttgcacgttctctttaagcttttcccccatagacctatccaatggccccaggctgaggcacccattccagggactcccacgcctgcttccaagctagcagtggcctctcatgagcctcaaccctattctgagatgctctgggtttggaggttctagtatctcagccacacatagtgccattttaccttgtcccagctggccaaagtgtgactgtgatcccctgtcttccccctcactcacccggcagcctcatcttggctgctggcgattttaggctgggttccacaagtggccccagtgatttatgatccataactcagtggtctcttccgccatgcctgcaggctcccaccttccggaagtcactggaatttaaaacaccatgaaaacaaacatctgtgatttacgatgtcaagagccatttccttcctcttgagacaatctccagggtgattttctttaggtcatctgctctgtagagcatattagttaaaaaaaaaaaaccttaaacataatgtagaaagatgtgcaggtatggaagacagaatggcagcacctttccacgggtggcagccatcagacagagcaggacatgcacagcgtggctccctcctgtccctggaaggcaggtctgctctgttctcttctttcacatgtgtctactcccagcctttccaggtgcaggacagggcaagcatcagaaacactgggtgagggaccggccctccctttgagtgcttcctccctgcacatctgagtcccatctgtagacccagagtgaggacatctgcccaacctccctgcaggctgttgtgaggtcagcagaggcccagaagccatggtaacttctataggagagacgcaggatgaagaaagttgttgtgacttttgcccagaattgtcaagaatacttcaagtggtatagatgtttttcccaaaaaaaagtaaggctgaaaaaaatcaaggctgatcctaaggctgttcaagtacaaacagtttgcaagtaatggaaaaagctataaaattttaatatagggagacctcaaagccttgaaaggaaatataaaacaactccaaaaaaaaaaaaaaaaaacaaaccctaagcatcctctttgttcctcagtgaaaatttccttactattttaagccacattgattcccaagagagaaactggcaaagcatggatggagaagcttcatttccctaccactgctgtgaaaataccctatgctaatttaaggatatagaattttctaataaaaacaaccagagtgcactaggcacgattattccaacctatctttctattgtattggtccatctactttgccgatttccaaaggaattagagacggctttattacatttaagataatatgaaagaagacaagtatagcccctctttgatttttatgttacacattgggcagtaggtttttaaagagccgtgtttgactctgtcctattttggggcccaggtacatgattcctatttttagcaactctctggtattgtgaatctgagatttcaaccaccagtgagtcagaaggtctggctgcccagagatatgtgactcagacaggcaggaatagtctgttcaccatgagatgagggcttaaaggggagcttttgtgcttagtgaaacacgcaaatgaaaacaaccgtttaaataggaacctattgcccttccggaaggctctttgcctgtccccgaaaattctcagctcacacccagggaagagctggtgctgctagctgggaaatgaggccaaccccctggctacttcctcctctttaggggccctctaaggcatctgggcggaggtttctgggtggcttcagccttcagaattaacacaacagcctcctgatgggcagcagtggtgggagaaaggagcgagtggagtgccatgtcgggcagggttgggacacaggatgagatactactcttttaagagtaagacaccgcaagaaaaggtggcttcccctggaaaggtgggaagcaacagattggtgttttcttgattagaaatgctatggaattcattcatccattcaccatccatccatccatccaaacaaccaatgcatatgggaagctggctacgtcctcggtcctttgctaggtactaggggactggtttccatcctcgagaagcccacaggcttgtgggaggaagataagcaggtagagaggcagcctggctgcaatgcccttccaagaccaaggttttgggattccaagtttctgaggtgttctgcatggtcagtagtccctgagaggcccttcccctgtagaactgagtgagcattcagggtaaacctggctaaacacagactagccaggaccattgtttctggccgtatgaacaccctccttttcctttcctccagacttagactccttttggagccaagcaccccaagactgtaggccttctctgggcgtgagcctgagggtcacagtgctcaccagccctccagcctcgccacagtgaagatgcttatcatggaggctgggatagttgtgtttttcgctggtgtttagatgttccagtgttccatgaaagctcctgaatctcttccctaaataacaaagtcctgtttggtatttggtgaaatgtttggagtgccgtgttcaaccaagctgaactaagctgctgacaaaatactgtctcagccctttaataataatagctaacatttgtatagcactctacagtttaacaaagcactttaaatgcacccagcccctttgagatgcgagggcagagttatcatgtgcgtttcactcaggaaaagtgggctgcccagaggaactgagtaacaccctccaggacccaccactggggaggccagaagctggccctcctgaaccaggcactttgcccttggccaccttctctgaagcctgtggtgaccacgcctcctcctctgacttcaggtttggtctttgcctctggtctcagccccctgtagtatcccacaggcagcccccaggcagatctccttaattgtcccctttctctgcttcagcacctggaatgactgtcccaggattaagtccacacttccagcctggaatcccctctctgcacagcctggtcctatcccaggaccctacactccccctcactacccccagcatgcctttcctacagccaggcaggacttggcaggagcatgccacgccaactttagaccccagtgctggctacatggggggaggagagggcaactcgttttttaactattgacccctccttgatgtctggcaaggggctaattagcagcaaacgtcttctgaatcagtaagtcagagaatcggtaaatgaagaaaacggacatctgtataggcataatagcatccccatgcagtccatagcaagaagagaccccagggtgggcgccttgtgcacaagggtctgtctgagatagatgccaaggccaatggacacatgccgtccacaggtcctggctgtgtggctcaggatgcactggagccaaaagtggctgcataccagaaatgtccccccacccccacccccatgaagctgatacagctggaaccatggtccccctccctccagtcagtgacactgaccaccggtggctcatctcagctgttcttttggcagatgccattcttttgctccccagagactgggtgatgtctgagagatagggttagggttggcaaggttggtgtgaagtgggtaactttggagcagcgagcgacccggtatgcctgtgcatccaggacacagggcccaggaagcatgagaatagcaggagccttggaggaggtgcccttgggggtggaatagggctcttgagggcttatcctaggcccaaggaaatgaagggaacttctttccttcttgtccctttcccccaacacacccccaagttgagctagcatacccatcatgctaaacaggtttaacaggttttatgatccaatctgattatcttattatgagttacagattgttttataggaaaaatgcttccccccatatcaataatagcttctcttttaatttagagaataatttcaaaattataattacacaagtacagtcacgaattgcttaacaatggggatacattctaagaaatgcgttgttaggtgatttcatcatatgtgaacatcatagagtgaatatacacaaacctggatggttgagcctgctgcacacctaggctatatggcgtagcccatcgttccttggattccgtacagcatgccactgtacttcagtactgtaagcaattgtaatacaatgctaaacatatctaaacatagaaaaggtacaaagtacagtataaaagattaagaaagtggtttgcctgtgtaggtcatttaccatgaatggagcttgcaggactggaagttgctctgtgtgagtcatgagtgagtggacatgactgcacactactgtggactttattaacagtggacttaggctacactaaatttataaaaaatatgtttcttcctgcaataatacgttaaccttagcttgctataacttttttgctttataaactttaatttttaacttgatgactcttataataacatgtagcttaaaacacaaacacacagctgtacaaaaatactctctttatatccttttttctatgtgatgtattctattaaaaattattttattttattttttgctttgtaaattttttgttaagaagtaagacacgcgcacatagtaacctagacctacgcaggtcatcaagatgtcatgaggtgataggaatttttcagcctcattataaccttatgagaccaccattgtgtatgtggcctgttgttgactgcagtgttatgcagcacgtgactgtcgtacatagtcattatcaaaaaattaagggcagatttttaaagagcaaagaagttcattcaaaatctcagaccaaagggatactactctcttttatgtgtatatccttccagtctttaccatgcaaatatggaaatatatttttttaaaaaagaatcctactacacatattactatgtactttggtttttaaaaactatatgtaatgactgtccttttgtggcattaaatatgaatctgcagtataatgtggaatcctgtgaaggtgtcctggtgttcataattcatctgctgtttggtgagcacgaagctgttttcacagtttcagcagcacagtgaagaataactttattcttctatatacaactttataatgtacataataacatatatatgtaaaataaataactgtattctatatatacccctttttgcagatgtattctaacagaaggatttataggtgaaaagttatgttttttgctttattttgccaaaaggcacttaagaaagcctgtccaaatctggattctcagcagcagaatatgaaagtttctgactcctcacacccatgccaacaggctgagcattatctttattaatctgaaaggaagaaaacaagtgaatgggacatagcattgggaaaatgctttctgaacccacaattactcttctaaaacacaacccaagtgccacctgtacaacctctaacaaaacatggctgaacccaagctggggcattcttatttctacctgtagttaagataaaattctgatcaacagagggatccggagggtccctggaaatgtattgagaggagattgatttgatccatagctgaagtttccttgaaaaaagacactggctgggtgtggtggctcacgcctgtaatcccagcactttgggaggccgaggctggcagatcacgaggtcaggagatcgagaccatcctggttaacacggtgaaaccccatctctctaaaaatacaaaaaaattagccgggcgtggtggcgggcgcctgtagtcccagctactcaggagactgaggcaggagaatggcgtgaagctgggaggcagagcttgcagtgagccgagattgtgccactgcaccccagcctgggcgacagagtgagactccgtctcaaaaaagaaaaaaaaaagacttggccttttaatgaaatacagcgatacggcagtaggcaccttcaacactccctagggggagtggacatgaacgtttttgcatgtaagacttggtcgaaagccctggtccaggcctggatgtgccacttgttacccttgtcacctggacaggcctcttcctgttttcacctgcggtggcttggggcagtgaggggagtgctggggcactggtcacacagatcctggttcctccctgcatcctggctgtgtgactggcaggcgatctgcagaaagattgtgtctctgacccctgggatagcgtgaggattagagcacatggtgcgagcttggcacttggtcattgttttcctttggctctttccctttttcatctgttccagcgagggattaaactatctgatgtctaagaaccccatgagatccaatttcctgaggattccaaggcagcccaggtgaggccctgctcttctaagtatgaagttcagagtcgctgtggaatccccactctgggaggcagtgctgtgcgggccctgcgtttcacacaggtagccacaggcccctgtgcacacctgagaggcagcctcccgcggagccctgctggactgtgacgttatccacatgccttagcagatgtctgtcattgtcttcttgcctttgtgggtttgtcctctgtttagaaaaatgaatttcctgagggcaagaccaggttcatcatctcctctgacttttgcctgccctcaaataagtctggaactagtacgagcacgtgtgacggaccctcattcaggggtaactgactggttgataaggagtttgactggcaaggaagtgatttcaatgggtcagcctctctggccctggctgtgatgatctgtttaccgcagcttaaccttagtggatttcagcccatcggcacaacccacatagccccattcagctcatggctgcatttaaggcccactgatagcctcggatttggggagtgttaaccccatgctgcttgggtatgcttcgacccaacctcacgggttaaaatcatgatggtgaggtattacagggcccagtcatttgttaggaaataaaaccagactgtttccaaagagtagagaaataggatgactcatgaagtattaaccacttaaaaaccctccttaggcatgtcttcccttggctcccttgagcggtgtcacccgacagattgcagtatgattgtcattgctgtgttgaagttacccaccctgaactcatgctgggtatcctcagtcagggcatcgttctgtttgtttctactttgtgcacataactggtaccttttcttttccctgccctgtctcgtcacttataatataaagggagttaatccagccacttgtatatcctgagtcctttttgtgtatccagcactttgtaaatttactataggcattcattcatcctcttcctcattcaatccacaaatattgaatatccacaactggcaggataacagccagttgctttgaacaaagagtttctttctaagcccatgaatgtgactatgcctagcacagtgcctggcacactgaggtgcccagtgcatttataaaaagcaactctcagggttcttgacggagctgtgtcatactgaagccccctggcctagatagattcgcctggatgaaacacttccctgccttcttaaacagaatgcattgaatttactttcatcttttcctgatgcctccaagccatcattttgaacatcagtgctgcagtaggatgatgtgttgcttctgttttattgaggtataccagttctttgcccttaacgttaaatcagcctgagtgttgtctttgtgagcccttgtgtttgatttctgtagtttgcctccttcccagcagtgaaactgaggatgcttattttttattccatcagtgaatctttgtgataacaagcatcttacatttatttagcagttttcatgtgcattattttatttaagccttatatcagctctgcaaggcagataggatcatttccaatttgctgattaaaagagaaaaaacaaacaagcaagcaacagactgaagctttcaagagctcagcaacctgccaaagatacatggctagaaggaagacactgggattcaggactgggtgtcctgattctaggctgggactctttctgtgccaacatccttcttccctttagcaactcccaaccttctttctagtttggtactggtaatctgccacaaagcttgttaaaattgggcgcaaaatgaccaggtgaaggtttaagagtctctcctttggagacagtgtttgagatttagtgcctgggttttgtggcctctctctatttggctgttcacaacctttttcttctctctgtctgaagtgtaagcaaggaggaagggtaacagatcgaattgccagatttaacaaaaaacaaaacaaagaaacaacagaacaaaaccaaacacaagatgcccagctggatttgaatttcagatagacaacaaataattttttgtaagtatatcctaactgttacatggagcatacttatactgaaaaaaaaattatttgttgtttatctgaaattcaaatctagctgggtgtcctgtattttatctgtagccctaataccaggactgtggctgggtgggcagtgtctgatctgtaatgacagcagagtcttcagtaagagtgggggctgggaaaataaattaatgggttgcagaatgtatagtgttaattagataatgcttcctggaaaagacggatcttgagctattatttacagggcagtagggaaatgatgtggccgctagctgcagaaagagcaactcatatgaaaaagaatggcagaccggagaggccaaggctcagagacacatgcacacaccaaataagggtctgtttactttgactgtaaaagtgtattactttttgactgcaacaatgtttcatctcctgcctaacataatgaccagtttggttcctgtcctggaaatagagaaaacggtgccaccttccccacacacttgagttgatctgacattgatagtttgaaaactttggttcccccaggcagtaaatttaaggagcaaccctgtcttgaaaacggaattaggttaccaaagacttccggcagttgagaatttcttgaaatccagaatatcatattttcccaataatgccttcttgcgatctcacacatcatgcttttaaggccgattgctactactgttaggaaatttacctgtgatggtctcaggtaatagaagttgtggataagttgaaaattgccagcctgttaaatggaatgatgtagcaaagaaagggcattctttttgaacacttcctccaggtgtgtgagcgtttcacactctgcattttcacagtatctttgtgaaggtagctctgggttctcttgcaccctggagaggtaggaacatgcctagtgccctcctgtgagtctgtcccctctcttctcttattaggggcatttgcattacaaatccacagaccaagcaactctttttaaaacatttatgttcaactgcttttttgagtgcttatcattccagagaatgtgaagatacatggcccaaaacctcctccctcaatagtgtcttgagtgcggagtctgtgggctgtcctgggatgggccctcaccttgctttattcccacagcacacctcactcccagatgaggatgtgcgcctatgtgtgtccctgtgtgtgtggaggctgagactgcaggcacttgcccaatgccccatgtagcaccactgagattcaagctcatgtttttttatttgaatgtcatactttctacttgccaggttactccatcaaaacagtgataacaaaccaggacagggcagatggtgcatagtggtggcagaattggacagatttaactgtttctttaagaaatatttactttcttgagcatttactgctgccctaagagactagctttggggttttcctagcttcgcagaagtgtggacgttgattccagcttttcccaaacatttttggccttgaaatgaagctgggaaccatactagatcaagctctctggccgtgagccccatgtctgtgggtttgaatgatctagagaggaactgcatgctcaatcagaaccagcaggaagctgagcagggttagaaggctcagtccctctgagagtaggaagagggcatacctcaggagcttgccaagtgcgcagaggtgaaagggaatgtgagagagtctatggggcaggggtgacatttgaacagggaaggatgctgtggcatagatatcaaggctcgaacaggcagctccccctgtacgccaggcattaactggattggtagctggattgcgaagaggtccaggagccctggaaggagggccacaaggtggaagattctcggtgagcatagggcagtggccactaaccaactggttccaaagtgttttaatgatgtaagtgcttagttaaatattaaatgctttattacacatactaactcagtaacttttacaaataacccggaagttagattttgttaatatctccatttcacaaatgttgaaactgaggcactgagtgattaagaaacttctctaaaattgtagctagaaagtggcacggctggactggaaccatctgtttaactttgaaggctgtgctcttaattacaaggtgacttttgtctccttatgcaaatcgcctgttactgtctctgcaggttgatctaggctggccactagaaatagttcacttcaaaatgatgacatggaggtgactgaatggggtgggtcatatggtacagccgtgatcatctgtccctgaggtcctaaaatggagtatggtgagatgtttatgcttttgaaccttcatgaacttttccgctcttccttgggccaaattccaaggtccaggacttggaggaagggaagtagaaacccactcgcctcctcaggaccctgcctggctacatgaaacccccattaatcacctctgacgcccgggcttggtctgtgaaggaacgtgggccgtatggcagtgatgggaggaggctgagatagtgctgaagatgcacagcctctgtgttccatttagaaccgctgaagctccccaggtgcaccaggagccttcccaagacctggatccgctgcaaggtgatagccgtggcttggttgtctgtgggtggagccgaggaaggcagaggtgtgcgtgtgtgtctctgtgtgtgtcatctctgtgtgtgtctgtgtgtgtctctgtctgtgcatctctcgtatgtgcctgtgtctctatgtaatgtgtttgtgtgtacatttctgtgtgtctgtgtgtctttgtaatgtgtgtgtgtgcctatgtatgtctctgtgtttgtgtgtttgtgtgtctatgtctgtgtttgggcaagactgtgttccacccccttccccaggcttgggacaagctcacattccacaggtcctagaggaaatgtttttgctgtccagggctttgggacaatgggcttgctatgttttaaattttgggccccaggaagagagttgcccctgtgttaggatggctgtggctcagtcacatactcccccatttctcttagccggccccagtgtgtgtcctgggggcgtagtcactgcccttccaagcctggagaatgactgcatcgtccaccgtgatgaagtacaggctttgccagggcttagcagggggaattggaaggccttaaaaggaacatttagaaatcaggagtcaaacgtgacttggacattaaaacttgattttgcatccagctcatgataagcatatagcagcatatacacaaatacatacaaagcagtgtgtatgtggcaatcatttggtgcctcactcacctccaaggcttgttaggggtgccatgatttgaaccatctcacctctgcatttttgctggtgtctccctcttctcagaatgctagtcctttgtataaccctttccactggctggggccacagaccttacaggactaagaggccatctgaccccctttcaatgagtagggtgctcctctttgtgtaggatcacaccgcagttttagcctgtctgaactcttgttataattctttgctcccctatgttcctggagggcagagaccaagccttgctccttgtactacctccaagggtatgtgagcctgccatgtgtatgcagctagcatctgaatggatgaatgaatgaacaaatgcaccctttctcacctccccacgaacactgcactttccccacatctgtcagtgaggaatgaactaagtgagatgtaccagcacccatggttgcctgtcttcccgatcatacggtttacatttgcagttcagcatccagtgctgtgtgctaggtacatccacagcatcacagtttcatttcatgctgctgacaactgtttaaacttatcctttctggagggagatggggaaaggaaattaggctccacatttgtaccagtaaaaagcttcaagagagatcctgagtgcagcgggctgaggatcacagaagttggcaggctctaggcctgatgctcatagggtggtatcccagggcttcctctgacccagtcagtaggaacaccgctccaggaccagagaatcctagaggacaggagcccaggacccgtgggggccagtctcatagctcctgcctttgggatttgtgggagggtttgccttatgggattccattctctgagctccatccatgtggccaggccctatgccctttttgcctgactcatgcctgagcttggacactaaaccagacctgcccagtgatgtccctggccagcttctacaggaggacacatccccacattgggagcaggtcccagactcaggtcttgccctttctctgtccccaccagctccaaggggctgtgcacttggtaggctgttggagtatcacaccagattccagaagaggggccaggagcgggaggattatgccctggggccattctcaccggactgttggaaacagtctttggtacctgctgagagagccagtgccagctgggaaatctgtgaggtctccctgaggaagcttgtcctagaaactgcagtgaggtgactgtgcggcaggcccactctcaactcgaggggagcccctcctgcctgctgcaggagtgggagcgtggggctagctgccagtgggatggccccagccggaggagctgggcagtgcagcgaggcgccagctgtgcctgactcctgaggccttctgctcaccggaaggggggcaggtctgcagcccctcccccactgcagggccaggacaggccgtcctgagtgctggccctgaggatctagaccctttggatcctatgtgcgggggacttcccaagagctcccggcccacgactgagtcacgcggcttcttagcaacttagtcaatccaaacgtggaggtgattggcatatgtaagaaccccctttcccgttggcgtgtatggtgtcttctcgctgagccacagcacctggtttagggctacaaatagtctccccgagggaatgggctcatacgccgggtgggcaaggatttcaagtcgtcggcacaagaagagacactatattaaggcctggttatgtttagaagccgtccagagaatgtttggcatgctgaatataaactcatgcttccgtctgctgccacactttaagatttctcccagagggacccagagtgtggggcgccctggagaaggagctgggaatgtctcgggggaaaggttccttcctcgggaactgggtggcatgggagagtagcttcaagcttgctcatggctggacttcccagacacagggtggggctgttggatgttacccgtcatgtcagcattcagagcccggcaggaaaaagcctccttcaaagtgaacccaattcctaaagtcctccttaatggaattcctcttagaggcaggcatcgactggctaactggtatgatactttggagttcagttagcccagaatggtgaagaaaatggctgtcacccaaaacacactgaattgaaggacggtggtgccagaaaagactgtgggttatcttatccagccccttcatctataacatggggaaactgaggcctaatagaggatggtgacctgctctactgatggcattcagcactacaccaaggtcacgggaggggtctgctctaatagcatgttcccatggactggaaaacgtcagaagggtagaatacaatacaaacaccgttaggactgagatgtggccagcatgaagtcccatggtcctgtgtgagtggaaccttggtgtggaaagtggcccctggcagcgttgggacatagagcagtttgggtggggttctaactgggtatggaatttcaacagactcgcagggagattctctagtactgtctcaattggaatcatcgttttttttaaagttaagaagaaaaatggaagggctcaggtgaaataaacattttacaagcagatgcttgcctctgccagcctgggggcattttgagtaggggcgcagcatgcaaagcagagaagagctcccacgtctgccccctgccctcctcccctctggaattttagcccctgcttggcattgccatgggtgtgaaaggtggtgtctggactcaggaggaaggtactgcagagggtaggaagagctctgcagtggtcccacggatctggctttaaaccaggagctcttgcgagtctggagctacgtgagttctctgagcctctgtttcttcatctgcagaatggggataggatggttgtatgggaggaacgcaccttgcacagtgtctggcacacagcaccctccgaaaggggctctccatgtactaggtgctcaggaaagattgcaatctgactaggagttttgaaatttgtgatttacttagtcttggggaggaaagaagagtcgttttccatggatcagtatgtgtagatgtggttgcagagacagtcagagaaagaaatggagccaggacaaaggggtggccccagcattcacgaaaggtttcagaattcctttttgggtttttggctatgacacccctcttaggagtcatgtttgttcactgtctagtgagaaggtgatcttctagtaacctccttttggggggcctataaggaattccttcttgctgttcgtgccttctctcacaacactagtgtgagaccagagaccccacctcacctccatcaggtgaagatccaaagcagagaggagtccctgactggaccttccccaggggtgggttgtgatgagatgagtgattatcaacactgagtgaggggtggtcatgggccagatgctgctgaagcctttacttcctagcagccttgttaggtaggagactgtgactctcccattttacagatgaggaagttgaggtagtaaacagtcatataacttgcccaagcacacacaaatagtgatgttgctttgatttcagccagacagtctggctccagaatctgtctctttcatctctaagccttttaagtagcagaaagagaaagatcaagggggcaatggggcctgaatgtgtccacaatgatggcaaacagaagaggaagtgtgctgggctgcggggccattgatgcccatgaactgaagagcccgaatgcctggatgatgaatggctggtcaccccctcatatgggcagcagaggctgtcttcaggctcggcggctcagctgccattggcctgaatggagtcctcttttttccaagccctttcccctggacaattgctgagctctgccccctttcgcaggcacctccccatgtcgcaggacaccagagtcttcaggttggaaggaccctggaggtcaccctgtttattcttccacctgactcaggagtcctttgtagccttcttggcaggacctgtcgaatcaagcaaggatgatggagaagcccttggatgtccatctagttgatagaaagttcttgttcataaactcaagccgaaggctgccctggagcagctccagccactggccctagccaggccctctggtctgttccctcgggccccttctgaaggcaatttctgagtgaactgtttcagatactctaatggaagtttcttggccttggccctattgacatttggggatggataattctttcttgtctggggctggcctgtgcatggtaggatgtttagcagtatccctggcctctacccactgggtaccagtagcagtcacgccgtacccccagctgtgatgaccaaaaatgtctccagatactgccaaatgtcccctggggcgaaggtggccgaaatcgcctgggttgatctgctgttctaattctgccttgcccagtgctcagagagcagcccccaccccagcctccgatggccattggctgaagcaaaaccatctcccttcacctggcctctgctgaagcggcctggaataaacaaggcagcggtccccaaggccacttcctggccctggaggtggtctggtttcctcagttgccctgtcagcaatgggtggcatagggcctgccccacccttctgtccttcctctcctcaagggtggctgatgcaggagttgagggaccttagggtccagggcgtggctggcagtggagggatgggttatttctaaggtctttcccacttgtccttccccagggtgtgtctgcagtgatcttctcatttggttggtgtctgccatgctgcagaagggaaaacagcattgcacgcctgtgtcctggcttagggtcatgagagcgtgtttcctcccatgtgggttctgcaggtgcttccttgggctgcccctttccctacccctacccctaaatacatgcccaccacctcttctgcacaccgtgggtctggaaattacccaacaaggagacgggagcaaggaagagacatccccaggctctggaaagtcctgaggacaaagccaggattccggtcttgtcaggttttctgtctgcccagtgcagaagaccttagtaacctgccctgttatctgtgtcctgactcagaaatgtgttggttgaaacgtcaggctttcacccaaaatgcagcacaatcaccctgtccctagagccacaaaaattccctttctctgtttccagtttgttctgtagcagcttggtgtgaagacagacagtctagagcatcatcaggtgagatgctcacctaatgtcccagacctgcactgtgggccttggcagaggcaccgacttgaagacattactttcttctcccactctcctgctcatttgacgaggtctcctaggctgcctaaggttgtcagaaggtctgtatggtgagacctcaattgacaggccctctgaaaatacagttaccctgtaattaaattcttatgctaaaaaaagtcttcatcaatcatacaaaataagctgcctgcatttgatgtgtgtgggttgcaggaagatttggggaaacgtggtcgggtttgaagaccttcacaagacatgccaggtgaattctgtgtcgctgctgtcatcccgccttttccagtaatggcctcctttctttatcttggtggggagatgctggttacccccaaggatgctgaaattagcactgcattatttgttgggggaaatagactctgtggaccgttgagtgtctggcaaagaaaaatgagttcaggactaaccctgacatacctcttggtggggagatgctggttacccccaaggatgctgaattagcactgcattacttgttgggggaaatagactctgtggaccgttgagtgtctggcaaagaaaaatgagttcaggactaaccctgacctacctctttgttgtgatataggatctgaaaaggcccctttgacctccagtgttgccaatctgtaagactggataatgatgtcacactgactttctcagagcagtggcgaggaccaaatcagactctgcaagacaaatgcagtttcaacttatgaagcatacacacaagggactgatggattgttattgtggaagaaaaggggggattgttattttaaggaatcttgtccttaaagtaatcttggttgagcgctccacgtgcaaggcagtgttctgggtgctggggcgaggtcacctgtggaattggcaccgaagcaggtcaggtgggagggagtttagaggaaggccacgtcactctggttgggatgctgggggctgttgtcctggagaaagtggcctcaggctgagtctggcaggtgggtagaatttccacagggagagatgctggcctatgcagaagttctcacccaccctgcaagtctccaaggcctgactcacacagcagagtgagccccccctggtgctgggaaattctgaagcccatggggacaaccttgtccccctggccgtgctcttatcctccctacctgtcccatgccaggagcgcttctatgctgctgccttggaagactgtcctaacaggcggcgctgccgcgctcagcacctgggctgggaagaagagcacttagtttgcctcttggagccctggggctccctgcagcaggaggtggagagggagacgtggagggtctgcttccatcaagtcaaggtccgaagggccccatggaggagacgggtcagcagcctctgcccttggatttgccaagtgccccccattgtgttggggctcagggagaatactccagtttggagggcttcctggaggaagtggagcatgacccgtgcctcaatctagaggagatttgaaggggaggctgtctgggggtgggagagacagtgcaggcccagggctgagatggccagagcctgtttgtgggattctgatgagatggcttggctgaggcagagctgtgtggggagaggcaggggaaggagatcagggcggctgggagcacaccttctggtcccgaatgctgggctgtggtgctgcactgtcctgccatcagcagtgggccttctgtgtgtggcaggatgagacgctagtcatgtttgggtgtgattaatctggccactgtgttcacacaggttagaggaaggagaatctggagacaaatgcctgcccagcgaccactgcagggtcccgggagctgggtgaaagtggcagagctgggaggttgctctgaaatgctgatggggatggagtgggggctgtcgggaaggactggatggagtctgtttttccagaaccccttaacccagtggaagccccgcctttcatgtgggccccgcacagttaggctgcccgagtccctctgtcctcgcaccctcacctggctctcttgcctaagcctgtcacagaagccctgcagagcaggaaacacagagcagaaagccacgcacacagcttgtgtttcctctggcgcctctaggtcgctctgcagccacctgcttggagtggtgataagccaaatctttctttagaggagcgaaaacacagctagccagggctgcagctatgactgcagcctgtagggaaacgccgggaggaacaggagactgttgagaaggggacggagaacctcaccagcagctgaattgaattccatctttgagacccaagagagggaaaatgcctttccgcatgcatgctctcctagctatgcttgtaagaagtgcgtgcttctggttgggagagcccaggaacggagtccatcctttctcctggcctccagggagagcccagacactcctgaccacagactggcttgtaatttggcttttctgagcatggcaagagaatcctgcatgtcacttgggcctgacacctgcttttgccttctccagacacggcaagactggccttgacttctggttccattctcgtttccctgggctgctctccaccttccaggcttagctggagtaaccatttcagagctggtcgtttccccgcagctttagattccattttggtgaggaaatttacattacccaggtgtgcacttgggcaggctgagcgacctgagtgaaatgaagccaaatcctggaggtgcaggtgtgaggatgggtctgggtgtggggtggggtggagggctgaagaaggaggcgtaacattgtgtaaggttggatattaaacctactgcagcaaaaccaactctgcccgcttccccgggtatttatcatgcttaccttctaccgcacacaccgtcagtgtgaactattgcatagaaaagggttttccaacattgccaggtcagagctgattaagctttcacttaagaccaagagtggattaaactttgggatctgccctcctccggagggggagaagctggctgatgttcactgacatgtggctgcatggccacatcagttgttaaatattgagaaacttcagctgtcctgtgtccctgagtgcccatcccccatccaggacctcccacccccccacatttcctcagtggaaggctgctccctggactcatttcggttggtgggtgccaccgtggttcagtattttcagaagttcactgtagcctgcaggttatgccaagtcccttgacactgggtcctcatatttcctgctgctgtattttttccttatgagatagaaatgagacttgtcaaaaccctactgactctgttaggcccagcccaaatgtcactttgtctactaagactgccctggtcacctgtttcttggcccacctgacacttggtttatacctcttttatggaaaattatatttaacttcctattacagctatggcttgcaatgggggcgattttaccacctggggacatttggcagtgtgtggagacagatttggttttcacaactgaaaggggagctactggcatctagcgggtagaggccggggatgctgctgaagagcctacagtagatgggacagccccaccccagagaatgatccagcccaataagtcagcagtgctgagctgagagatctacaagcctccgtgtctgttcagctccttcctgggagctcccagagggcaggacacagctgcttgcatcttgccccaaccctctcctccaggcccgcaacccccaggaaccagggtgagacattgcatttagttggacactcaataaatggggctgaattgaattcatttagttaaatggaatcaaatcgaattgaacctaagctgccctgcagatcgttaggcaaatgcaccaattacctggtgcagtagcttagtctttcctttgcttcacaatcaagaagtggcctccgtgacctagactggggacttagggatgagagtgaaaattgaaaatgcttgcaagctgtggccttgagtggtttcagacacttctcatttattgtgcatcttaatgacacaagtaactctctgaccttcttgtctcaaaagtgatggggccaaaaacagccactgccccaactgtctgttgaggaaggttggaaaagtgcaggactgtccagagtctatactgagaggcagtgtggtatggagctgagctcctcagtgttctcacattggaacccacagagaagatgctcccatctgaactgtatgcccaggaaagggggcaggcaggcggctggctcaggcgctgcccttggccccaaggctgtgggagcagagcctgtcacaccagcagtgcattaggggcacactgtttgtgtgagcactctggtgaggcagaaaaaacatgacctgaagaggcagatgacctctgtgtggccagccccttcaccagcgctagctgtctgaccctgacctgtgggcttgccctcctctgtaaaggggaatagaaattcttccctgcgtccaggcaggggctggacttggtcagcttacgtgcctctccccaaatatactaagtgctctatatgcattgctcccctcccctccacctgcattcccattccacagatgaggccgctggggcacagagagattgtgttgcttgcccagggtcacacagctagtatgcaataatgaccggtttcaaactcagagtccatgccttggccgttctagagtgctgcagcatcctttctgtccacttctcaaaaatgcagcctctgcccatccttccatcctccatggggtcttgaaactcaagcctgctttgcctgggtgtttttaagctatgcttgcaatatgcgcagtcatctctgggctttttatgtgtcactcattgatgagaaccaaaactggacaagattagaagtgaggctttccttctttccaagattggattttctgttccacccagaacaacctgctgttccccagctgcacgccctggtttcaagtaggtctaaaattacaagagaatcaccttgctccaaggaagctggcatctctgtttcctgatgaaagtaggtactagagagtggagctacccagaaaccagggggtggcatgttggccatgtggaggcaaacagagctgtgttttcttttcttggccttcttaaagatgtatctaatttggggcatgttttgtttggttcatcttgtatctggagaggttcttcttttctccctaagtgacatccctcttgagcccacaattccctcttctcaaggtgagtaatcctctctctagctgttcataattgctaattagtgaacaaagaggctaaccaacaaaattagctattgggccagggtttaggattgaaccaaagggtggagaagggctttagtctgcttgttttttatttgtttgggttttttttccttaaaaaaaaaaaaaaaaaaggaatcggccaggcacagtggttcacacctgtaatcccagcactttgggaggctgaggcgggtggatcatctcaggtcagcagttcgagaccagcctggccaacatgcggaaaccccgtctctactaaaaatacaaaaattagccaggcatggtggagggtgcctgtaatcccagctactcaggagcctgaggcaggagaatagcttgaacccaggaggtggaggttacagtgagctgagatcatgccattgctctccagctgggcaacaagagtgaaactcagtctcaaaaaaaaaaaaaaaaaaaaatcgcaacaaaacatacagcccttccccactggtaatttatcataatcgtatctaaagtgttcttacccaacatgttcaccatttgaggaaaagttactgatgattccttatctcatcagctatggaggcctcagaggggttttccaaaggaaatgcctgacctcagcataggatggaagaaggaggtgccgttctccgggagggtgtgtccaccccagcccatctgccaccaggctggcctaaaagaagcggcgtcctcctgtgtgtgtgtgtgtgtgtgtgtgtgtgtgtgtgtgtgtgtgtgtgtgtgtgtgtgtctctttgtcatcttcagcatatccagtgcagaaagagatagaggcattcatattcagcaaatgtttcttggcatgtaattacatcatctctttaaaatctcattacaaccctttccatttattggaccaagagattgaggctaagatttacagacttcctctgggccacacctagtaagtggcagtaacaggaattaactatactctctaaagtcagtggccgtagtgttaggaatttacgactaataaatgccaattctgttgggaagacaaaaattatcatataagaaaggacttgaaagaaaggagaagtgctaaatgacgagtttctaagtgcactaggctttctggaaactgcacaatccaggttaaccgcaagcggtgggcagtttgtgggtgagagaacagtgcgcacgcccacatggctgttctgtgagatcacctcttgggaaatatttagaaactggtgcccactttcccaagtttccagcaaagcctacagtcactgtcctcactggaggtgcagtcagtgttcttctgggcccccgagactgggaaggcagattcttactccatttctgtgcctcttccactgccctctcttccctctgctgccttctccctttccttctgctctttgtagaaaataggtctgcagcagccactgaactttgtctctctttgttctgctcttggtcttacttcccttctttctccttccacctctcctggctgatttttcatatcatccccatgagaaagctttttgccttccttaaaaatcttctcaaaagtgaatttctgcttatggtttaaacagataccattgtcagcaggggtcagtgatgacccacccatctcctacactccttccctttgctctctggttcccacattcgattctgtttcctcccacttgctcggtccttcgggtagtctcagcttgccctgatctctaccacgtgaatggagggaaagctaagccgtccttcctggctttccagtgagccagtgggtggaccttcagcccatagactcaccttcctgcctatgtgagcatccagaaaacttttggggtgtgttaccaaggagacaatggagtatttattgtactaccttccttagactttcttatgcaacctgccctctttcccggattgctgtgatgctgcagggaggtttcttaaattaatcttgtcaaaatagccttcgaatccttttggagcaggatttttttttttttttttaaatctcacaagacacaaactgttcaagggaagaattaggaacaaagacaacttggggactggagagaacttggagagcatttagagaaaagcggggaaatgattgatgggttggaaaataggagcatggatgaatggtgaggggaatggagatgatttaactgggacagagaggctgacaggtgacctagtaataggcttccagtttgtggagggttaggacatggagactggcttcccactaccagggaagaaaagacacttaaagtgggaggtaggggagcctgaggctacaggaagaactccttatcacagggtctgttaattatagcaaggcaggatggatcacaagctcttccaccaagcagtcttcccagacgagagcagcactgggacggtggtagggatttctgtaagtcatccagtgcacagcttcccgatcgcttgtcctcagatagtagcgagatggctgcctcagcatctccagggacacgtagtaaaaaatacaatttcgtgggccctatccagacctcctggtttagagtttctgggaggaaagtccaggtgtctgtattcttaaaacacacacaaacacaccccacccccccccacccccccaccccacacacacacacacacaccccaccccaccaggacaaatgcagaactaactcattgagaaccaagaggctggtgatgtgaggaaagaggaaatgcctcccccggattcctcaggttgctgcctgcagcatcccgctagatcttccactgcccgggagctgctcaggagcccaggccacacctgccctggtggctccgtccagcatccctgctgggtcacttggaatggacgctggggcatcaaagctgccctacagctctgaagaacccctgcgtctctccctaatgacaagggtgctgggaaaaatgctcattccatgtttttatctggacttcaccagcagtcactgaagtcttaggtcacagttctgtggagttttccaacgggtccctcagacaccaccgctgccccacaggggctagaatggaatgagcttgggagtcaagagatgtatctgccttgagcttgagcaggtcattttacctctccccgttgcagtttctttctctggaaaaggagacacccggactggacagtctctgaggtccatccagctctacctttctgtctctactggctgtttgaagaattgcaatgctcgaagagtataaagtagattcagtgtaatatttcgtagtgaagtattttaaattcaatgttttttttttctttgcataacttatcctagggaagttgggaaggatgaggaaaaatatacgaatccactcgtctccagctagctcagcttgtgtgtaggcctgccgttcaccacacacgaccatgcgcaagctctctggtcccttggtggcagcataccaaactacagattctgttctttggcctcagaacagtcttgtgtatgttttaaatgtgtagcttggaatcaacgagtatttttcatggggagactaggaaggttggggggctgggatcattatttcacacacttatttgcttgtttcttgctgaattccagattgcggtggtactttaaaaaaaaaaaaagctccaatatcaattttaattttgcttctaaccttttggaccagccacaccctgacacttaaaaaataataatgaaatgttagtataagaaaaattgctagctgactatcccagccttcctccttagtaactaaacctgatttggggcacattgctacctagactgtaatagactttccagtgtcctgcatggccaggtgagctctggacgatgatagagataaactaaattactgtaggctataatttaaggaagcctcctttaaaaaagtaaggaaaggatccttttttcctttctcccttcctcccttcatttctccttccctcccttctgcctccctccctccttcccagggtgcagttgtaatggctggagttctagcagccactttggaccataagatggaagccaagcattgaggatggcaaagcagaaagctgaaagcctgggacaggatgaccatggggctgccatcccatcccaggactgtctcccttcagacatcttttatgtgagagaaaaataaagccactattatcttttgttttatttatgcagctgcaccaaattctaatgaatccatataagttccaggtgagctggcttagatggtgagaaccaaggtcaaaggcaaagggtagccctgataagcaaatgccactgctgagttgctcagagcagtagacttttgctataacatagcacaggaaaggagagattttggagacagatggagtgtgacgtcgagctctgcctgagaccgactgtgatcttgatcaactgattgtcttgagtctggatttcctaatttgtaaattagagtaataatctccaccccgcaggccattcattggcattagacatcgtatgtattaggtgtcttgtttagtacctagcacacagctggtgcttaaaaatagtggctctgtgtgtacataggcacatggtatgtccccctggccacagacactgtgctatgcgctggggacatacagaggcatacggtgtagccccagctctgagggggcgtgaaggccactgggacatctccagtgttgtagcatggggcccaggtatgcagcctgtgtgtgccttcatgctgtgatgcaggcttgggaatgcatcccaagcctgtgtacagtgccagagattgaaggatcccatcttagactggcacttcttggccttcactcacgtgggcctgtggctcgggatacttcccttctcctttactccttctgaatcctacatgtttttgtggcacgcggaagtccttcctcccccatagacccacccaacctagtctagctaatcctcaacattgcactgagcttatttcaagaccacacagttcaagacaacacttgttctcctgctggggtgcatgtgtgtcctctccagctggaccataatcctcctgaaagcagagccccgttctgatcgttcctttagtgtggaaggcacagtaggcactcagtgttttgatggagaaagctgagttttacagttaagaatatttttttctgcgagggctcagatcaggcctacagccctctctctcctgtggctgcagactgtaatgagggagaatggaaagagagcagggagggatggctcagccccaggtgcacacatggcccagcccagattctaggcccagcgggcatcaggacagctgtgccaggcagacacaggagagccttcctctgacccaggtgtgaactggatgataaaagatggtttctcaccctaaggaaatctctacataaaagaagttccctcatcaaaatcctcccagtggccgtaacaggctgttagtcacatgcaataatggcctggggtgagtaggtatcaggcagctgggctgaactgcctccttccatcaggagtgagctcttgcactcccacatggtcacagtatggccctccagaggaacactcccctcacccaagagccagtcctgcatcctcttgtcccagttgtgccctttccctggctgaccatagcattgtctgctcttggaggttccccgtaaggagacaagctaccttggatggcttcctgatcaggggcctgcttctccctggaaacccaccttgtctcatctcataatatactgaggaggatcttggaaaccactaaaatgatcattcttcccctctccatatcatttctatattcctgcttttggaaactccacatcattttgacctggctcaaccaattaggtagtccactccaaataagttaccaacccgtactcacaaaaccactttcagctgtcggaggagaggtggctatctggcgctgtttgcagatgtctttctcttctgttcttgttgaatccttccccagtttgctggggttcccagtgggggagtgcttccacagtgcccaccccaccccagcctctgcctctccccacccttcctgcttcctgttttctagagcttttttctttctttcccctgaaggtgatctctgtataagaatagccacaatatgtgtgtgggaggtttagcaacataacctggaagatctcttacagcctctggagtcttgatttccttgagtgtcttggactggataatggtgtgtattaaggtttggggtagggggacggtaaagaatacctctgcttcttcttggacctgtcagtgaagcacagtttggaagggagaaggctggggatgttcaaatagtaggcagaccccctgaacaacagtagcaggtgtggtccaaacttactggccggcctgcaggccaggaggccagtgccatcatcccctcgtgcctggtgacgatcagcccttagagctttgagtgccagtttagcagagagggtggactgatccctggtcttctccaaggacagcctaactcatcagtcagcatcccagccccagaccagccccaaggtccactgcatctgatgtgagtcttcagacctaaacgagaggtgaggccggagtgaaggcccacactctccttttagttctcttttttttctccattattggcatgattttgacagtctctaggtgaatgcctataaggacaaaggaaataaatttaaaatgtgaatgcaatagggaaaatgcaatttttacaggcgtctctgagagttggttttcactttaagacctggcagtggcagtaaaagtgcacaccttgtttgaaaggtgcagtgccagtgggagaggctgggagtggaccagacatctatgaaatccacactgttgtagaaacctgtaaacccggtgtggcggcccagtgcagagacttaggatacaaagagagaggaacttaagttatgttgtggaaatgtgacttcttaataccgttcagaaaataggtacagaggcaacagtcccaatcttctgctagaaatttcactcggctaaaagcagaacgtttaaatacactcttgccatgggctgctgagaggtccagctctcaagaagtgggagcagctctagggatggccacgctgggctcacttccgagaaagaggaagagttagttggggtgaggaaatcatggaggagaaagaccagtcatttcggggctcctcgtcctgaaagcagagactgccgtacagaactcagcccacggaggtcagccacagacacctcaggaagcacaaagaagagaacgatcttgtgattccaggagagtctctgaaaagaaggtagttcaagaagagtagaacaagcaggggcttgcagagaatgagaataccacatgggcctctgcggtgaatttaaggcaagaaggagaatgaggaagcaacagcccctgcctgtgagtggcctacaggctagaaacagaacagcagacgctgccacaaaggaattgacccaatgcatttacaaagcattccagtctttcttgtccagctttatcccaagtagtggaagaacctcctgatactttcttaaagcttctgacagtgatctctgtgaaattatggagcgtgtgtaggggccagagaagcgaaacattttgattttctacagctaggaggctgtaggagagtaagctcgatgttaattcctggaagactcttagggtatattctttaaacaatagtgtgtgtgctttcaaaagaaatcggtaattttaggaacatggcaaattaactgaactttcttttattgtaggtctactaggtttagatcaaaagaataccgaagatagtgttgattttattaaggcactgaggggcatctatcatgatttcttttgaaaaatatggagaaatatgttaataattgttaggccaacactggcccaaaaatgcagattaacagattgatgtcagtttggagggaggacttcagttcattgtcatggggctcaggcctagtcagcatgtctaccactggccttcatgaaattgcaaaatagaaacttaacgaatttgttgaagacacaaagttgggagagatgactaatgccatataaataatgcatagaaaacaatatttttaaaatccatgctggtttttaatttaacatgacaggagaccaaatatgcttgatatacttcctaagaacatataaataaagtaccataaatatgccaacaagtttgaaacttccaatcacattgtaaatcaaggggcgctaaagagcaagtggaattcctaccagtgggaatgggtgaattgagaggcatttttctggcctgcactccacgtgtctatccactgacagacccaaagagctggattgttgaataagatgtgattcaggcagaaaaatatgaagacatatgaaaatatgcaaggtctcagaaaataaagcatacatgtcctcctccagagacaatgaatcaattaatttttaatgttccaagtgattgagatgaatgaaaatccaggaccccagcatagtataaaatggaccaatggtgaattgaaaccaattaaatagagctgaggcatcctgagcaagagcacaagctctgggagctgcaaatgagcctcacccctgccacttactaattgtgggactgtgcgagagttatttaacctttctgaacttcactgaacaggtgtgatttctgtgaggattaaatagaaaatgtaggtaaagtgcccaaaattacaactcttatcaactttattagtattatttataaaaataactatgttaactatagttacaaaataaaaattagaatttagttttaaaaataatattttgagaaataacaatataagaaattgcctatataatacaagactaaattggtaatgacaaggaaatattgggtgctggagggaagcaggtgttacatgtattttaaaacttacttgtgttaatgaagggaaccatgagttaaagttttgttttgaactttgtaaattatagaagtttaatttgcaaatgcttttaatacgtataaaggttaaaaatccgggtttcaactttcaaaaactcaagataaaacaaaagtatactctatgacagcagtccccaacctttttggcagcagggaccatttattagtctgttctcacactgttataaagaactacctgagacttagtaatttatgaagaaaagaggtttaattgactcacagttccacaggctgtacaggaagcatggcctggaagcctcaggaaatttacaatcatggcagaaggcaaaggggaagcaggcatgttttatcacagcaaagcaggggagacagagagagagcgcatgcacaaaggggaaagtgctacacactttcaaacaactagatcttgtgagaactcacttactgtcatgagaacagtaaggggaagtccgccccatgattcagtaatgtcccaccaggcccctccaccgacatgtggggattccaatttgagatgagatttgggtgggtacacagagccaaaccatatcacaccagtctcatggaagataatttttccactgactgaagggatgggggcagggttttgggatgaagctgttccacctcagatcatcaggcattagattctcataaagagcatgcaacctagatctctcacatgcgcagttcacaatagtgctcgagctcttatgagaatctaatgctgagaggaggcagaactcagggagtcatgcttgctcacctgtagctcacctgctgcacagccggttcctaacaggtcatggaccggtaccggtccgccattgtggggactggggactcctgctctatgaaacaaaaaatgagaaagtaaacacacagatatccagaagcataaaacaaaatgacagaagtagggttgaacgtttaactatgctaaaatatgtaagtgggttaaacactcttattattaaaagtataagacttacagatgttggttaaaacagaaaatgtatccatattctgtacaggagacactaaaacaaagtgttgcaaaaaggctaaaagtttaattaattaattaggaaacagtatcagaatagatttacaatataaagcagctggtgctataaaatacaaaatttaattaatttacctctggaaatttagaaataaaaaagagcaaaaattaataaggaaacataatagcataagagaatgaatgctattcatagtggtatgctaagaaatttgaaaatcttaattgtaactttctagaaaaatataaatttcaactttagataatttttttcaaaatacagaagaacattaaagttaaaaatttatttaataaaattagcattatcttgacaaagatgtcaccaaaaaagtcttagaataatcttatatatgtacacagatgaaaaaagaaaaatgaaataaaattgaatccattggattcacagttaggtaagacacagccaatgaattcaaggactattcaatgctgggaaatttaatactataatatatcacattggtaagtcaactaaaaaatgcagcatgcaataaaactcaatatccattttaaatacaactcttaaaatactaggaatagaatgacagctaatatgataaagaatgtatctcaaactaacagcaaacatttagtgatgatgtcctggaagcatttcctttaaaatcaagaacaagaaaggaacgtgcactagaaccattgccagtcagcgttgtgaaaggtcgaggggctacaacaaagcaggacgtggaaaggaagagagaaaattatcaatatttgcaaatggtgtgattatagtcctagaaaatctaactgaaaatagttagcattaataaaagggccccagaaacgtgactggatatgacataaatagtttaataatcagtagtttttatgtaccaaaaatgaccatctggaaaataaaatggaaaagaattcctatttacaacaattacaaaacttttaaaatgtgcttagggaaaatattctaaacacatgggactgtatgacaaaattaaatttaactaaaagatatagaagaacagttagaataaatgaaagcatgtcgtatttctataggaaagattgaatatctgaagatgccaaatctttccaaattaattcatgagtttaagaagaaccctaatcaacagcccagggtgtattttctttgtttatattttggtttgggcattgtttgttgttttggtggggagtggaaaggagagtgcttagaaaaataattctagaatttatctggaaaaataaccagaccaaatttaccaagaaagatatgtcatgagcacagtgaggaaaggataagagacggcattcctacagatgaacagaatggtgcgggtaaaggaatccacggacagagctgtgtgaaacaaacaaccaggaaacagcctctagtaatgatatttgttggggcataaaataaaatttttaaaaataaatgtgtccaaaataaccttgtattcaacagcaccattttaaaagtagaaggccagagccataaaataatgcatcagtcaaaggcagaagaaaatttgcatcctcctatgtgtctccaaagtagcatatactgtgtactagaaaacaaaatctgttttcccttacaaaaccagtttaaaattcccctcaatttatgtatggtaaaaataactttaaggtgcttctctaaaaaatgaaactaatatgcagtgcatctgtggctcatgagaacctactatatggtaaaggaagcaaagaagttttaaggaaggtgggcgagggcagggactggattggtaagtatttggaaataaaataactttacatacctttttttttttttgagacaaagtctcgctctgttgcccaggctggagtgcagtggcgcaatcttggctcactgcatcccccacctcccgggttcaagcgattctcctacctcagccttccgagttgctgggattacaggcacatgccactgcaaccagctaattttttttttgtatttttagtagagtcagggtttcaccatgttggccaggctggtcttgaactcctgacctcaggtgatcctcccgccttggcctcccaaagtgctgggattacaggtgtgagccaccacgcccagcctacatacctatcttatacatttagacaaagcaaattacaggtggattcaaatagttaaatgaaagaaaataaaccataagacttgggggaaaaagactatttaactgcctccagaattatggaagactttataaacatgaaagtaatggaggaaggcacaaaagaaaagactgagattcaactcataaaaatagaaaacttttacccacagaaaaattacagaaaattttggaaggcaaacacacactgggaaaatgtttattaaagtggtagacacggggtcaatattgctgctgtataaggagatcttagaaatcaattaaagaaacacatccccattagaaaatttggcaaaggacgtgaacagatttattcacaaaatataaactacaaactggtaaatacattttgatttttaaaatcagcctcactagtaaaatagaaacataaattaaaagaagatgctatttttcacttaataaagtaacacagattaaaaaaatacattagcaataggtgtggtaaaatgggctctcatatactatgatagaaatagaaaaaagttataacctttctggaaacaatttagcaatgcatatcaaggtctttgaaatgttcataccctattaccactaattttccatctaggaatttgggctgaaaaataattagacaaagttttatatttacgtataatgatgttcatttcagctcatgtataacagcaagaaaagaggagagaacctaacatcaaaggggaatgtttaaatgtgttataactcatatgatgagctaataaaacttatgtttttgaagccaacaagttgaaatgctcatttcacattaatagcaggatataaaatatatggacagcatatgaatttgaataaagtttaaaaggaaaataaatatgcatagtatcacatttttgtacagtataaaaataaattcaatagtatcttaataaaaattctgggccaaaactaatgagataaatttagtattagaaatgctaagttatgggctcagcctcaaaaaataggaatgaaagaggactaacttaactattgcatttatgaaaaggatcggggggatttcactgccccaggcttggtgttgtgattgtagtcgaagctgacctgggttgccttggtggcagtctgcggtgtccaggtggggagggggcagtccctatgctctgtacagtcaggctcgtctgctctccaagtttaaagagaagcaaggtgtgtcctcctctcatgttggtcacattcagtgagggaccccaggggaaccatctggaaactgttacataaggaactgcagaaggatctagggatgttttacctggaaacaaggatatttaggggcaatggaatagctgatttcacatacataaagggctacatgaggctgaaaaatcagactaattctgagtagcttcaggaagcagaactagattttgggtaggagtgaaagggagaggcaggttttagagccatgtaaggtgtagtcaggtgttcatcttgcaaaatggtgagctcaccaggacacaaagcatccttgaggagtgaagatgagaggcttcatcgggcagaagttggaatagaaggcatcaaaagacccagccgtaggatttctgcagtcccatcattgactgactggaggcccaggtgggcagaaagaaggcgttgaaggggcatagactcctttggccattggttttcaacctttgctttacaacacaagcacctgaggagcttgttaaaacagtgctggaccccacctccatagtttctgattccgcaggtctcaggtgaggacctgagaatttgcatttctgacaagctctcaagtgatgttgctgctgctaccactggtgctccaggaatcacactttgagaaccatctccttaggtcaagagcaagaaataaggagatattcttaagcccgatggtacagagacctagaaaaaaaatatggcacacaggaagcaagcacatactaaatgacatatggcttttttttttttttttttttttaatctcggactcttggacaatagtgttgaaacttgtggaattaaatcacagactggaggccgttctttccagatccacatttctacctggatgatgggctctgtcaccaggccaaagaaattgatgttgagtattaaaagcctctaaggggagcggatgctgcaattttcttccttcccctcttagatgttcctagatggtggggaagttcattgtcacttagaaattcatgaaggaaatagaatattgctcatggacttcagaatggcccataattagctcttttgggttttgttttgttggttggttgtttatcatttgttgttttactggaccttggaaggagtcttcctcagtgaaacccctcgttataagaacagatagtatatgatgtagacaaccacagatgggacccccaagtttgatgatgtcctcagtgtcctgcagttattccaacaaagatgcacaattcccgtcgtcatctccattcaaagtaaggctcatttatttgagctttcagctgattggtttaggaagagaactgtgtacagcctcccccacatctccccaccccttgctgctctcttcctgagctcactatgtcagtgtgagcagactgtgcgcctaacacaccggagtctgttgccatgacgctggggagaaatctggttcctatagcaacatcaggttgactcgttgcaccttatgacacaggcagatctccagcaggggcttctttgatctccagttaatccaggagagatggacacatgtagtactggaaaatattacattttcccacaacccacctaatcctgcctgcctgcctttcatcctccacattaccaaaataataataataaataaatccgcattccctttttttttttggcaacctgaaaaaataaagcaatggatcactttaatgttctcagcagattaaaacatagtttgagggtcaatccctatcgcctccctttccaaggcccatccatccgttagcctgccccctggcatgttccttgaggcctgtccatctggcctggctggctggtgagaagtcctgtcagcctcaggggtccggggacatgccagtagtgcaatggcagctccctgggcaggcctaagaggccaggggctcgttagcaatggtagcagatggatgcgggggcagccccaggagaggccagcaagtccggtgccgagaagctccttgactcaccatccaaaggaatgcacggtgttggcttctgtatgtcacaaagtgggcagccagcctggggcactcggcacattcctggtctggtctgtggcgggagaagtgacaaggaactggatcgttactgacaggaaagcatctcgttgttctttaaagagactttcagcgaaggaggatccatgattttccccaacccttcatttgagtgcctttcagccttccttggggaaaacatccatatgttttctacttatattacttacttgtcacccctcattcattcagcaaatgctcactgagcttctccatgtggcaggctccgttctagaccctgagcactgaataacacgaacggggtttctcctctcctggcacctacattctcatgggggagacagataataagtaaagaaaatgtcaggaacatgaatatacaatggggagttttgggggaggctgcaaagtgagtggtcggcagaggtctcctgaggtgacactgaggcccgactgccctgaggagcctgccctgggacaagctagagagagggtgtcccaggcagcatgcagaggccagcatggagcgctctgaactgggcagagcaatggggcaggagtttggcgtggattcaggggccgcagctgtagggcttgtgagccaggggagagattggattttaagtgatagatatgggaaccattgaaagtatttcagaagggaaacaacagaattatattcgtatttatgagtttgctccagctgccttaacaaaccctcttcaagcccattttccttttgcctttccattagtggcgattaaaaaaagatatttgccacccttcttaggcttgaaggtgatctgcaagtcaaacctcatgcttttctccagtatcagtaagctcagtcccatttttcctctcttgtgcatgacgaactttgttatgccagccttcaagggatattccgaattcctttttcttagaattctagagccagcgggggccttacagatcactgggtccagtccttattttacagatgaggaaacttggttgccacagtggtcaagggacctggcccacatcacaactccgctagccagggctgggcctctggtgctagaacccagcaccctcttccgccccacaactagtagacagtagactagtagtcttcccacgtgcacgtttacttaccagtgctcattatttcttctcttccttttctgattcatctctctgccttcctctggtcctgtcattcttccctggtatgctggaattttttagtaatggactgttgattgcagtatgtgggaaatttggccataagttttggttctatgtggttttttattgtggtggcaattgtttttgccattttctgctttggtgttatttgtggctcccattggggcctccctaagccctgcttattttcccatgactggggactgggtgttattgttcgtaactcaatattccagccatggcattcaaggccaccaaccctctgcctgtctcaatagcatatcacagcccacgccacattggccttccgtgggccaggcctcagggtgggaactcagccagggtggttttcctactctgaggcattggtagagcggtcagggctccctgctggcttacacccacatagcagctcctaactccacagtttgtcttcccctcttctgtccactccagctcagggccccttagccattcactcagcagacaaagaatactaatagtaggtgataaccactgctgcagggatgacacattagcattaggtgacaaataaaccatctccagtcaacattatccctgctgcatccaaccagcacagccgggaaagcaaacaatgaggcagaagcgcgtttcctcactctgaaaggcatgcatgcactggaagttgggttcattggagagcagggtggcttcacatcgggatctgtggcaggacagcctcagagcttggcagtgttgtctgggaactgggcaatatcaataataaggtgcttccagtgacagtctacgtcttcatctttacaaaagctttcagagataagattattgctccagttttcagatggggaacaaaatgagacaggattagtgattctttcaaggtcagcaggctggggaaagtcagggttggaacatgaacccagtgcagggcgcacttctcacacactgcccttctctctgggcagcagatgtgcatgtgctgagcggctgccaaggagacaggatggttgagactctgcagaagaagggctggcatcttccctgtgctgcctcagtgggacaggttgggctgagatctgcaaggtacaagcagggcttgcttggggttctgatgagaatgatgcccagtgaatgatgcccggtgtcgtggctcagcagaacaggcctggcatgaggctcaggagatgcgtttcctgggtctggcccaccttcggctcctgtggcactgggagtactcttaagtcttagctctctgaacaccaagtgaaggagttagcctggaggtccccaacgttacactcactgataccattctatgatttacaaagctcttccttgatgatcagatgtttcttttccgaggtatttcaacttcccatttatagttagtattgaagtgccacctgtgggttttccaggccgctgtctcttttctttatacatcataccctaaggatgcttattattgctgctgttgttaaatcaagtccttgtcttagtatatgtatcttaacatattgagttagagacagtgcctaacttgacaattctgacagtgttgatataatccatggagagtctttagcccactggttctgcccagagctcactggtaactcaggctctctgcatggcaaagtggaagacgttgaccacaccacttgattgggagctgtcttccttccctgggatgaaaccagtcaggaccttctcacatgggaggagtatcaaagactaaaccaacctagaaacagtccaagaagaaccaaacaacgaagcaagcaaatcaaaacaggggaagaggacaagcagggccccaggcagtttggctggtgcccagcacagggcctggcactaacaagtgtttgagaaacattgagtgaaatgacatggttgctcagtagaaggagcagccatgctcaaggccagagtcgccccttcagtctcagccattgcttggggaagtggtctgtttttgccattagagaacacactgccatggaggacactctagatcagaagtccaggtcggagtcatggctttgtgacctcctgtgtggctttgggcaagccactaaactctgagcctctgtatgtgaggacaagcgcccattcttcttcttattgcagagtcctcataaactacaactggatgatgccccctgagtacctgtgcttgaggaggggggcaaatagcaccgagatggtgtcttacccacctttgtatccccagcatgtggcacagagccctcactcattaggttctcagcaaagatgagtgggtgttcggatggatgcacagcttaggcggacaggtggacgaataaatgtgcaaggaaggttctgggagctgctggcggcaaactttgcttgcttcccaaggattgtcctacctttctgtaataggctagggggctgtgagctgcagtatatttctgctcacaggagccctttcccttggggagctatgtggagggcaagaccaccccaagaaccccaacatgaaaccttaactgggattctgctgctctaggctaagcaatcctacattcttgactagaagagtgtgtcttaggcatacattgctgcacagaaaaccccccacctcctccctgcttcacagagatggggtgaaagatggtggtgccctaagaatgcagaacccctgcgccacacaaagcatgctcgctacgcccactagctggccaggaatggtaggaatcgcagggaccatgatcaggccttttctgctggggccacctgctgctgctgttgtcacgttctgtgctctgccgccatcctctgcgggggtggagccagcatcttggcagccccagggtaataattaggggaggggcagctccccagctggcgtggtatttgaggaggggcctggaggagaaggaagggctgggacacggccaacaaaaggagaaattaaatgggctgtcctgggagcccatagttagcatttaaacaccagcatgagctgtgggtttcactgagcagggctgtgtgtggcctcaatgccctcctctcccggcccccgttctgtttgtgagcacaagctgggaggactctcagcagagccctaagaggtgatgttgtcatgccgaagcccaggattcaggggctttcatgcagtgcaaggacaaacatggcgaacaccacatgcacccagctgcaacagcgctgcacccctgacctactcacagccctcaaggaactcaccgaccagcctagccttacagcggctatcacaggtgtgctgggcccctgacgtcgagggatttagggttttgttttatttgctgtcagcatggttcgcgttgcaatttcgattgtgggaagacagccaggaaatactaaagaaacaccccatacctccttcaccacagccacaggtactgagcattgagcacacgttatatgttctttatctcctccagtctgcactgctcacttaaaaggtggggcgtattatccccgtttcacagctgagtaaagtgaggttcacaagaatgttgtggctggcccaagttcacacagctaatgaggaggggaaaggatgccaagtgagtccgcctggctcctggagctccttctgcttctccatgatttctgaagaacacacgaggcctccctgtgtcctgtgggagaattcactgtctctactacgtgggaaaatgtgaaagaaggtaggcctgagtgctcccgtaagctttggggaatgagagctgagtgaattggccttactaagtgatctggcagtaatctggtggtcttgagcctagaagagggttggggtgagtgtgaagagtatgatcccccgcagagccgagtcatgacttctcttctgccaggagctcactggactcccatacccttctttggactttagtttcttccagtaataatgattataaagtctagaaataatacgattaacaaccacaactgagtaaatacttgggaattagtgaagtgctaggtcttgtgagcagattctagaggtagaaacagccccagaaacacaagctagaaaaagaggaacagcttccaggagagttccaggcatcctaagggaagcacgggcctctgcatgtggatgggttcgaatgccagattccagcacccctctatggcctctgcaatctgcagtcttttaaaactgtttttacattagaacatcacagggttggactgtgccgccacaaaagcgcctgtcttcattacccatgattcctcaaatcatcaaacgtaagcacatagatgccaaccagtgtctacggggtgtaccaagcacaggcccatgggagccatctaccctgtgcgggcaagaggggagcagttgtctatgggaaatttaaaaacaatcataaaattcacagaaagatggtctactttgtattgtcatcatggcctggccattctaaataaggtcggggataaaatactccccgtgggggaagagtgttccctcaccacttcacaggctactaaatcttcattgctctcggccattgcttggttgtccttgttctttttgtttgtttatttgggtccttccttccttccttccttccttccttccttccttcctctctctctttccttctttttttctttccttttcttttctttcctttctttgccaataggccaccgtagtcagtttcatgtgtcttcctggtcaatcccatgtttactgcacaaatttaggtttcttttttgtggtcgcatttaggaaactacctagagaatagtgagaaaccacaggagggaaggagaacagcgagaaaaatactgttttctttttgttgtttactcataaatgtcacagaaatatttcagttcctttttggttttgataagtgcttttttaaaccaagtcctaaatcaagggcctctcttggcaatgtccctttgacagaaccgagggagggtggcagggcagggaggcacaagctgcagaggcacttgtactgtacaattttctgggtcctgactgataaattattgtgcatcttgtgcgtgctctgacatgcagtacaatttgtccatgtaacggtgatgataggctgtcccgggctaataatcatgaaccctttatttagctccttcagccttttagagaaatcttaagtaaccgttcatatccctttatcggttttctcttccacattttagcataagtggaaaaagcttttaaccctgagaattttactcaccctggggctggggacaaggaagaaggcacgttgttaaaagtgtacaggaattggaggatcttgacgctcccgatagaacagctttttcttggtctgcctcctaggagtgtgaggctgtctgggtggtagagattgtccagtccatctctcattttactggtgaggaagggatgcaagccctgagacgtaagtaactggcccatggtcacatggcacagtcatctggaagtgacattgagcttccttcacccattacagagagcctgccatgatgcgggacataataatataaataaagacatggccgggcgcggtggctcacgcctgtaatcccagcactttgggaggccgaggcgggcggatcacgaggtcaggagatcgagaccatcccggctaaaacggtgaaaccccgtctctactaaaaatacaaaaaattagccgggcgtagtggcgggcgcctgtagtcccagctacttgggaggctgaggcaggagaatggcgtgaacccgggaggcggagcttgcagtgagccgagatcccgccactgcactccagcctgggcgacagagcgagactccgtctcaaaaaaaaaaaaaagacataatattaccagctctcctttggcacaggtcccctggttcccatccccacccacgtgatggtcaagtcagcttaagcacgtgttcaacactctgcccaagtggctgggtgtcccttgtatccttttctgtgtccaagttattgatggtagattgtgttctctggaagacagatgtcgtcctggtgtgaattgtttcctgtagcatctgtgtagtctaaccctaacttgcatggtgcttgcatggctatttttggacttggctttgcaagctttaacacgtgacgctgcctgtttctttacaggcacaatcttgcaattgaggtgactaaaaagcagtacctggacaatggtattaggattcaaatatagcttctaaaagattggaacgatagcaagagggcatgcaggcattccatctgtgtgtttaggtggtagcaaggagcattcagttgctctctgtctgcagctgatgtttttcacccctctgggagcccggtactgacctcttctgataaactgggctcttaataggttggttagattcccagtgttcccccatccctctttcatcacatacacaaggggtttgtccaagtgagtatcacaaaggttgttcttggcttaaggctggcacgaaagggctctgccagtgagcaatgttagaattaaagacacaataatactaattaacttccccatgcctgtgatctctgcatttattatttgtgtagagataaagccttaaataacatgactggcctctttgggggccctgcttgggagtgggtggggggcaatgtcctcattacagcacgtaagatggatggtgtcctaaggcagaggcacatcaccaaggatcacctacggaaggtgcaacctccttcccagctggcccgtgtgctttttcccagcagcacgtgggatggggagggggactgaggtgtgtgaaagaagagaagcaatttccagggatgtggccctttgcaaggtctccacgtccatggccatctgccttccaggacctgctgtgaactgtgcagcagacacactcaagctggctgcctgtggttgtgggaagtccctcactcctctgtcctcagttttgtcatctctgaatggaggaagggaggttagatcaggcttccaagagtccttgaagttcctgaaattatatataaaatgtgaatgtgtgtcaggcatttgtcaggagctaaaaggccattgcctgtgattctcagaggtccctgaaccaaaggctaagggccaccaagtgagatgctccccaaggatccatcttcctcttcccgattatgattttagaacttccaaacctaacgtgtgttgtcagctcagacaaactcagcattcaggttgtagagacagatgatggatactcggtcagaaatgccctataaattagctgctttaaaagtattgaccaagtagccttccaggaaagttccccagatatggtggttctggtgttcccacctcatctgcaacagccctgggaagcctggctccttgcctccaggttttcctcgatgtaaggccctccaccccaggacactgtagcaatcctggggctaaccctgaagaccatttccactattgggcagccttggtggtttccttgtcgtagagaactaacccagtttccccagactggctaccttctcatcatctcaccatctctagctttcactcagatagaatgatctcagagcaatcggcagcatttctcatttggaattttactaacaaattaataataatgactttgactatggggatgcttaagaaaatctcccagtccttggaggtatcctgggagaagatagaaacaactctgagaatcagaacatctgggaggattctgcagatggatcccagggacagcccaacaatcagagggccctccttcaaagcaagtgctgcctccagcctggggcagacccatccctctctgtgtcatttgttttcccaaacattcccttcttaaactggggttcatgaagtctatagatggaattccagagggtttatgaacttggagaataactggatctttattatcacaggcttctagccgaaatttctcacggtattccttcgcaagtatagacaacacaccacaatagcattagcagtttctgttactttgtccaccattagaaaccatggatattttcttatcacgttaagatggttgcaaatatctcaaaaatattgtttgctttcaatactacttcaaaattctggtaatccactagattttgttatttaacatattatcaaagaagcatgcatatttgtgtattacaaaattgtctttaaatatttttgatatctatatttcaacataactggctttatttgcaatcctttatttccatttaagaacattattctgagaaggacctacagccatcatgagaaccaccaaaggcagccacagcacaagaagcttacagacttctctaaattggcaattcacatttcaatcctgtgctgcttgtgtctgaatcatatcatagggggagctctgagcttatgtgaacatcgaggctgtgagagacagaaaggagagatgtaggagccaaccttgtgtgtgctgagattcgaaaccagtcatatatcccataagcaaatgttcctgaactggcaaatcccagaatgtattttgccctgggcaccctttacctcctcattaaataagaaaataacccatgagtatttgaaaggaacttgcatcgatgtggaactgactgacttagaatagagctcatccgagatcttgagatgggcttattgacacaaccgcctttcagctgttcttgagagtcccacaggatggggaaagccttggtattagtcactgggatcagagctgggaagctgcttagctctgggctcagcaggctggaccaaggccacttgtaggtaagagaggcagtgttccctaatgcactctagatcagctggaactagtttgtaatcctggattcaagtcccagcactatcattaatgaactgtgtgatccaggcaagtggtttatcagccttctcttccataaaatggggtgctgtgctgtgtaggtgtgcctggcttgtaagcactaaacgagtgtagctattactatgatcatatgcaagcagcacctgtagcatttggaaggctcaggaaaagaagggtgggtgggagcaaaggcaaacaagagcagtggagactaaagcgggttgtctcgtggcgatgcttaacctaggggcctggaatttccccctttgcctggtcttactgtcattggaataatcgtaaccactcctgggtggtaagagatcagcaacatagctgtagttcgttgggtggcaggaatgtgccctttgtccttggtttctaagtaatgatgtcttcatgtccggttgagcgaggggtcagcttcaaccctacgataaaccagtggagttataaatggaaagcctgaattcccagacagaggaggcgatccaatgagacagcagagtaagtagggaattttcactgcctcgtctgcaatgataatgtgaatagcaataataatcatcctaagaaaggattttgtctcagagccaaggcaaggaaaagagccttttcccatgccttgctggggagagctgaacactcaaaccacgtcaaaatagaaggaaccaaaaatacagtgaagtaccctttgccccagtgagaagccagtgcaagacaacgccctgcagaatgggccagagggcagaagaagaggccagggcccagtcctgaatttgtctgttggttctcacttcctcctttaatcatttcagaagagctgttaatgagcaggaaatctaattgattagcatttcatcctggcttccctttctgccaaaggtgctaatgagcagggaaatcacagatcctccgggtgcaaggtacttgagaggttgtgaatgcatttgccacccctacatggagaacctcatctgaacctcagcaaactgataaggaccactctgatttttaaaaccctccagacaagctgccttccttctgtggatcacacaccacccaggttagcagcagtgccaccagaaacactgttgcactcaagttttctcgcaggtgactcatctgcatgctccttggcggagaatcgcgggttactgtactgtctttgtgtaagagttcttcatattctcgaagatgtttgttacatcttgtttctactgtctttcctccaggttacacattgtgcgtctttcaccctttctgtgcaagttgttctttctgaccctaatcaccttatgttgttggatcttactccaagttcatctactttggtcgtggattcggaactgagcctagagtccatgaaggactctagcaagaatgagcacaattagaggtctcctggcaccctgttgttgtctcctttttttctttctaacaaaagcccatggtcagtctctccagttcatgactctttttcaaccccagcctccctttctccgtttgtgtacatgccctatttttcttttcctggtagacaaccctgcacttttccttctctgagcagcaacagtgaaagggaagggaggtggagggagagtaagccacatgggcaacctgcaacctgggtctccagcctcttgcagtcttggtcctcaccgtggcatagtatagtaccagtagaggcactgcagggacagatgaactccatagcaaggcattgcaagaggcctttggagaaattcctttgcaatttgagcaaagcccactccttggcttagcaaatctttttactttttggtctgctagaatttactgcatgcgtagttatccagaaggtacgtctctgtcccattcggctttattagacgccatctggaaaggggctgggagtggtcagcctcagggaggggagccaactgaccgtgaaaggagggagatgagagcgaagtaagcatagtgctcgctccccaaggattgaaactgcctgccccgagctgaagacttacaaagacgtagtccagattcccagagaaaatgaggctttatacccataacaagttgtaatttgagtcaccggggaagttaagaaagtgaaaacatgagcaaatgccagtgtgatggaatcagagtctccatgctggaagagacttcagagggatctgcttgagctccctggctttatagacaggaagaccggccccctcagatgcacacagccaggtactgcacggccgggccagaggcttttctgatgcctgcctccctctcccggcaacggaacctcatcacctagttctgataggaaaaaaaaaaaatgaggtgatcagaaaacaacttcctcaactttctcagtctccaccagcaactaaaattgttcctgtatccccctcaccttatccacttagcacccctacacccaagggcagctaggacccgctgctgtctctccatgacctccctccctctgtagccttaggtaggcccctggcagcttttgcctggaaatttgcaacagtctcttgacgggtccccctgcctccctccattcttagttcacctgtcactctgtggctgcctcacccatctaagaagcaaacctggtaaaattgcttctgtttaaaagtcttgaaatcctgcaatggcctcagtggcccctaggataactataaactccttaacatgggctacaaataggtggttttcacccctgggtgtatattagaatcacctgggatctttttaaaattacccgtgcctgggtctcacccgtagtgactccatagagtgggcctgggtggggccagtggtgtcctacagctggaaccagccccagcgactcaggagaggccatcgcttccaggaatcttatgagtgggttgttaaatgaccattattaaaaattatacaaacttgtaagtaagtacattatgttaaaaacaaaggtaatacatactcaaaagtcaggtttgcctgatgcctttactacctttcgaggtaatttctattgattgtatctgctgggtggaaatactatataatggtgtgctactacacatctcctcccaactctgcagtcagtgacatcccattggtagcttgaaattgaccatggcatgagtatttacatcatagaaattggcaaatgctacaaatcagcccctgccccccaacaagtcattaaacactgatatcactggctgcggctcaggtatttacatgatttttttaaagctcctccggttgattctgatgagcagcagagttgagaagcaccagccaggatctgactctttctgcctcttgagcaagcctcatctcttagaaaaactctcctcttccccccaactttcttcagtcctgccacacacaaccaactgcagtggcccaaacacgagtgccatgttatttctcattctgtgtttttactcctagacacactgattcttctgcctggaatgcctgtcacttccttgtctgcctggcaagcacctgttcatcttccaaaactcagctcagtactttgtcctgtgtgagctcttcctatacctcctccccacacaggttcaccactctgcctctgtgacctgtatgtcttctcattaaagggcttttagaattttatggtgctttctgattatgtgtctctatctccacccccattagacactaagcacccgagggcaagggcgtgccctgtttctctgcatcccagcagggagtgcagcaccagcatagtagatgctcagtccgtgtttactggatggataaatgagctaaaccaggtttcctgactcctggggcagccttcttgccaccccagtcctccacctgacccagcctttctaaaggcaggaagagtaaattactgccattcctgtgatggaccacattctgagcttgctgctgctagacgtggtgtgaagatggttctcacagctcttttaacaataagactttttaaactgactttagttattccaggtttagaattctgtccattcattattcattcaataacatgccaacattattccaggcctagagatgcagtggtgtgcaaggcaggggagggcactttcttcagagcactttcagttaggaggtgactcagatgattaaagaagcaatgactggccgggtgcagtggctcatgcctgtaatctcagcactttaggaggccaaggtgggtgcatcatttgaggtcaggagttcgagaccagcctggccaacttgctgaaatctcggctctactgaaaatacaaaaattagtcaggcgtggtggcaggcgcctgtaatcccagccatccaggaggctgacacaggagaatcgcttgaaaccgggaggcaggggttgcagtgagccgagattgcaccacggcactccagcctgggcgacagatcaagactccatctcaaaaagaaagaaagaaagaaagaaagcaatgactaataagtgaactaagagcgaaagaaagaaagaaagaaagaaagcaatgactaataatgaactaagagctatagcatagaaaatgctaggttccatccagggttagctcctagtctgtggggtttcatgaaggctccccagagtaggtggagccaagggctgacacctgaggcaaagaggaaggtggaaagctgttccctgcaactggaagatcctgtgaaagggctccagggccagagagagctcagcagctgcaaggaacagaaagaagttgccacaaagcctgtgaggagtgacagcagaggggcgagggcaggaggggctttggaagccattttcaggagtctggattctatcctaggagcagtgaaaccccactgaggcataaaaccagggagcccccttaccagatctgtactaagagaacttgcccagatcagtggcccaggagagatgaaactagagagcaggagaccaagccttgagtagggaagaggctgctgcaatggatagaagggaggggtttcagaagcagaatcatgtctcacttatatgtggaatctaaagaaatgaaactcatagaagcagagagtagaaaggtagttgccaggggctggggggctggggaaaatggatttgggtcaaagtatacagagtttctgttgtaaaatgagtaagttctagaaaacaaatgtgcagcatggtaactataattaataaaaatatacacttgaaatttgctcaggaagtaggtcttatgtgttcccaccacatacacacacaatttgctatgtgtggtgggcacatgtaagactatggtgactatgaggtgatggattagttgatcaccttggttgtggtaagcacttcatagtgtataccaatgtcaatcttacatctcaataatatgcagttgttatttgtcaattataccttaataaagctggggaaaaataagagcagaatcatggaacatcatgactggatttgatgatggaggtgagggaagtatgaagaatctgagagaggtagggagagctgatcagttcatggttcatgttgggtttgtggagtttgcagtgcctatgacgtatccaagtgtagttgatcagttcatggtccatgttgggtttgtggagttggcagtgtctgtgacatgtctaagtgcagttgatcagttcgtggttcatctttgggtttgtggagttgacagtgcctatgacatatccaagtgcagttgaccagttcatggttcatctttgggcttgtggagttggcagtgtctgtggcacatccaagtgcagttgatcagttcatggtccatgttgggtttgtggagttggcagtgtctatgacatatccgagtgcagttgtctaggagtcacttagaaattcagttctggaaatttgaggagagatgtgggagagaaatgtagattggggtcatcagtgtatgataactgaaactataggagcaagggtcattcattgtctaggaagaatgactagggtaggaggagaataggacatcacatttaatcaatgaccagcgtagacagagctagtagcagcaatgagatgagtgactagagaggtagagagaaaaccaggaaagtgtggagtcatggaagctaaggaagatggtgttgggaatagaggtggtgaacagagtcccctgttcttgctgataggagaggtcaaatgagataaggacagaggcgtggcctttggattccgagatgtgttgatcaccggtgcacttggcaagcatgccagaggagtgctgaggcagaggtcagagcacactgtgccaagcagtgggaggcaagtgatggagacaagcgtctgaactctaggacactgtgctgggaaggagaggggtgaaagaggacagttttgggatcaagggatatcttctatttttgttgtcatttgttttgaagtaggagaggcaagctggctaaactttaagtaaaagggaagattgtgatcctgtcctctgtgagtgaaagagagcatccttttaatgtgatcagtgccagatgtcatcttacaagccctgtgtctaacctgataggcatttagagtggccaaggcttcctggactggcctcatttcattgatgactgcttttgcagagactccattgcctcctaattgtctacacttggggcctccatttttctcttccttggcagaattttagaagaagcctcctgtcaccagcctttcggagtccccactgatactggtgtgtgtgctcctgctgtggtgctgcccacccaccctcgttcttccaaccctccggcaccgaatccctcctttcactccctctgtcccctgggcaagttccagctggttacagtgaattcccgtatttccctcctctcttacttctcatttgtcagagtgcacaggaggctgcctggaatgccctctactcccaggctgaggaaattaaagtagctaaatttttattatagcatctctcaagaatatttctagaaatcatagagtcgttgcaccttactactgaatagaagttgaggggttatttgacccattccctttaattctaggcagcttgatttccaaactctttgtaggtacgtcttctttaagatttctatataaaaggtcccccaagcccagcccttatgactagggcgaccatgtaattttgcattcaaacagagatgccaaagggggccctgaccaaacaggacttgggaacccaggtatgatctttgggaacaccagaacaacaaccagtgtaaatgaggactgtcctgggctagccaggacatgcagtcatcctgcctgtgatgagtaatgggggacagaacccgagagactcttttttggctagtgcttaacattacgggacagtcactgagcatttactatggattaggcattgttccagacactagaaccgacaacaagatataatccttgccttaaaaaactgttggggaagaaagacacaaataaaatttgccataattctgtgtgataagttttgatttcagttttggtaagtaatagctttatggacgaagtgctttgggaaaaaagcagaagagggatgagtttggaggggttcgagaatcagaggaggtgacaggagagctgggctttgaagatgatcaggatttcttggggaatagggctgcaggagagggaatgtgtgccaagagtgtggaacgaaggcacggtgggtaaaagagagagcaagagctaaagctgagaactggacagggccctgacaggacccattcaccttctggaggcatcattcattctgtgcatttgtgatctctttttgcgtgagtgcaaggtctgaagtggcctgtggcatgctggagcttagtagacacatctggtgaaggtgtggagaaggccagagtaggaaaccactagaagtggagaggtcacctcagagactctccacacagcagtggtggtgtgttgcttctgaaccaaggcagggtcagagaggacagaggaagaggcaaccctaagagagcatttggcagctgagacgataggacgcagtgactgacgtggaaggtgaggaacgcaaaaatgccaagatcacacaagcctgcttcagaagaccaagaagatggggtttcccttcattgagacagggagcaggagagcagctaagtctgacgtcaccaaaggccatttggggcatgtttgggtgtttgtggtgcatccacacggacacgtccattaggagtttgtatctatgggtctggggctcgagggacagattcatgtcagaaatactgactcctcggtgcactgatagaagatgtgattgtagatgagatgactcagagagcaagtgtggagcgagaggacttgggaacccagggttgatttttgggcaacgtctaaccccaaagaaagggcaaccacgaaaggctgttcagaagcagcagtcagcagggtgggagggaaccaagaacaggactgtcagggaagcccggaaggaagcagggtcaagctgggaatgctggatgagcagttttcttgaagttacgggcaggagccatgacagtgggcgggaggcagagaggaggaaacaaggtgtagcctactccttctgagtgcttgaagtggggcaaagacaaggtgtgaagatggagggtgagctggggtttaattgaaagtatttcttttcaggttaatggagttttaaggaagtccctttttacagtgacttctgaaagaacacccactctgtttgccctctagacctgggctatcgaatccactagccactaaccaagtgtggctatttaaatttaaattaattaaaataaataaaatgtaaagttcagttcctcagtggcactggctgtgtatcaggtgctcagctgccacgtggctggtggccaccatgctgcacagcaccggcacagagcgttcccgtgtttgccaggagttccgctggacagccttgttttaaactctgcgtttcaccatcttcctaattctgccttttggaacttagtagagtatataagcccaatctgcttatctagtttccaaacctagttctgaggtgaagaaaaccagatggtatttttatcatataagctgaagaattcttacaattttcaagtcagcattttttccaggcattgaccgataataaattgctccatgttgttaaacataagagagagaaatgtaaacgtgagaattatttctactgagccatctatttagtctttccactgctaccatcataaccacttccatctgatcattagcttttgtgcatctacagtaacttcatttttctatttttttgaaagttatgagctcgttagggaaatttagcaccatagccccttccttccaggaagctgcagaggccctgctatagctttcacctgtctgggcacctaagcagaccttgtcagctgctgggaagaaaaagcatctgatttgccagcccctcgcatgcatccatcagccgggggtgggtttctgagaaaccgttgtgtctgggcccaagctcaaagcacacttttcattcctccctgagctattttccttattattctttagaggggatttgtcatggggtgatttggtgtctccaagatacctgggtttaaaaaggtcctttgcattattctgcatacagcgggacctgaacttgggctggaggaatgttgctgatgcccaggtgggaggcagaggattgtacctgagaacttttcctgtggcctttacctgggggaggagagcatgttggcagaatgttctcagggctggccccatcgcacatggatgtgttcatggatgagttcagcagaagtatggcagctagggagcttttctttatgtccatctgggctttgctatttggctgaaattcctggaccaatccttgtgtccgtaagaaccctgtgtccttaccttgtgtagactgttgactactgttaaccctctagtattagcacagcaaagtactgtcgtgcacttcaagcccctgtacaaacacatgcccctcagccagacctcaccctgggagctgctccggagtcaacagcccttgaaagtgcactgtcctgcctcgtagctggaagctaaggctgcagcttcatctcccatggaaacctgggctcactaggaggggcaaggcctccagaccactgtcttaccatagaagccgcctagcaaactgcaaaccaagcagaaaatgcaggctgggctgaggaggcctctaactgatcaccagccaagcagagaaggggtgagtggcatgtgaatgactgctagctctaggcctggaccatggattcaaaccctgctggctggccctccaccatctcctgctccagtgaagactgtggcatccattagtgaggctagagtacacgcttctgactgtggaatccttctcattttctggctctgccatccactagctgtgtaactttgggcaagtgtggcctgacagccgaaagcttacccccactccttgctagctatatagctgagggcaagccatagaacttctccgagcctctgtttctagtctgcaaaagaggataaaaatacttactgtgcaggttgttgcagagatgaaatgatgtttatcaaatgcctaacacaaaggttctgtagatgctgcttctctattctctctggtttaaatccttggcaggtactcgttttcttactaagaaggttataagatcaaaatttcttattttagggaagtaaaactcaggaaagggtttacatctctgaattaggctgaaaagggacactggggattggtcgtggaggctcactcctgtaattccagcactttgggaggctaaggtgggaggatcatgggaggctaggagttcaagaccagcccgggcaacatagccagatcccatctctacatgtctacaaaaattaatataaaaattacctgtgtcatgggcctgtagtcccagctacaggctaaagcaggaggatctcttgagcctaggaggtcgaggctgcagtgagctatgattgtgccactgcactgcagcctgggcaacagagcaagaccctgtctctaaacaaaaaaaaaaaaaaaaggaaaaggagggacactggagaagaagctccacaattttccaaggtgccagggtgaaccagcacgggccaggcggaggcctgtcgtctgcactcccacatggccctcctcctactcctgatgtggcttctctctggtatggacgcaggagctggtccctggcccacaggagaaacttggacacagccatgataaacgcaggctttataatccaagagcttgaaaagataagagtgactaataaataaaaatttctccatttcttcatgcttgattttcaagggaagatgtagaataaatttgagccaccttcccctgcaagtatacctttaaatattaaatattttacttaattataaaatcccctgctgtctggagagaatggccaccttctctccttagtggaaacgatgtcatcgcatttactgagtttgtgaatgtaaagtgttttcagactgtaaaaccctggatggggttctggaaggcctcctctctgggcccatccaaaggggtcttcagaagtgcattggtgacaagaatggcatcaagtaggaagggccccaggtgtagagggatgggcagtggacacctctgtcaggaagagtcttccttatccagggctatcaggatcaggagctagagcccacgtttggagaaaacacaagaagtagtaccaacccagtgagtctcgggtaagaaattggagtggtttggtttcccatctctaacttggccagatgtaccataagctgtatctgcaaagccagtgtaaggctagacttaagttcaattaggatccaaattcttcactgtcaacttgtctaagtttttgtttatttcacttagtttcctagtgaaattttcatttgaaaattcccagccttatttatttatttatttacttattttaatagagacaggatctcactctgttgcccaggctggagtgtagtagcacagtcatagctcactgcagcctcgacctcccaggctcaaatgatttcctgcctcagcctccagagtagctgggactacaggcaggaagcactgtgcctgcactccagccttcttttcttttctctagctttttttttttttttttttaaatatttgagacagagtcttgctttgttgcccaggctgaagtgcaatgacatgatctcagctcattgcaacctccgccttcttggttgaagagattcccctgcctcagcctcccaagtagctggaaacacaggtgtgcaccaccatgctcagctaattcttgtatttttagtaaagatggggttttgccatgttgaccaggctggtctcgaactcctggcctcatgtgatccatccaccttggcctctcaaagtgaccagccttattttaactgaataaagggaaaggggctttttttttcatgaccctgaagacagagggactcagtgcgcccccagtggccagaggctgtagttacagggaaagcaagtcgggtccctctgagcctctggaagagccaagtggctggctgctggaaccatccaggagaaaccagattttccaggctagagctgtttcctttttccagtctgaggcttcccatgtattcctttcaacgcagcacctctatgtgcatccctgaaccctatgatctgagaaaaggtagccgaacccccgactttctcttttgcattgacattagcacagatctgagccacatgagtagttgctcataccattatctgcctttggttgagaaattagaaggtgctaggcacaaacacacgtcatcttatttaatctttacaagccaggatccggtactagggtccccagtgttcagagggattaatttgtcaagatctcacagtgagtagattccagtctacctcactggagcctggtgcccgtccccatggtctgcactcctggtgttgaacctcagcaggggctgtccctggcctgctgaaacagttcagctgaccaggaagtgtgtgtgcgtggtgtcttttgtacagtctcagcccctgggtctgacactctgatggtcttttagggtgctgggttatttcctggggttctatctgtgccaagttgtgtatctttcagtgacacacatctgttcaagccttctgagttggggagcaacagaaagaggtgaagagagaaagcactctgggaaacatggaaatatttttgcagcctgattgtctctgcatgcaacactagcaaagctgtttctgctccctttcggtgtccgagtcaaggggacgaagaggcctgcccaagaagaagagggatgatttttctctttctgtggttgggggcagaaaggcgatccggctgcccaagtggttcaggtcaggcttaactcggtctgtggcctctggcctggggaatgtgctgagctttgattcagctaagcagtggcttgttgcccaggcctgtggtcctccaaaacaccagctgaggatcccaaaacttagggcccttgtgaacagggtgagttgttgtcaccaggacttgccttgtcaccacctattacattttctggggacccagcagcccctggcctatggccacacagcaggcgcctcttggccaagagctctggcatgaagctaggcctctccaactatttaatgtttcattagcggttttctaaaggcatggggccaagcctggccgagccacaccattcagaagtacgtgaacacttcataaaaccaaactgttgaaggatcccaaacccaggaatctggtcacttggagtccaggctggaggcccagggcaggctgctgcactgtctcagctctttcttggtctggatacttctgggccacacatctgtctctcaaactgtttagcctgttagtagttctaaactaacttctaaatagtttatatttggggttcaccaacctgttttcatatctgatgaaagctttggacttgccccagaaagagacatccatgcacatatgtacaacattgtgcttagaattgcaaggtattcacaagccacactctaaagatcatcagtggatccaagtggagaacccctgtgctaaaccacacttgcttccacacttaaactctggggactgtggagtgttatccatcaagaagagtaaacaggtattgggttttgttttgtttggctttttgcttgtgtcttggattttgaatcgaagtccttgagtggtagaatgggggctagatcattagaatcactccagacttcacaggtaagagtgggagctcagttgagtgacaggcccatcccagacacaaagtcactccagggcaattattcagagcccccaggagctttcacgctctaggagcaagtcaggtaagcagcagcaacacacgtgccgcggaggcggcacctacattcagactctcattgctcttgattgactgggtggccctggaccagtccagagtccacggctctggaaatggtaatcaggcttgtggttgcaggggaatttatgtgtaccaagtgactggcacaaaacagaggcccaatacactcaatgctggcagatgatagacacagtggagcagcaaagctggtgaggatggaaacaccccatcacctgtgagtgggattagagcgtctgcagagggcatcctgctggcttcccaagccatgagccttctgataaatcttactgctctgtcagagcctctgatttaggggtagggaggggcagtcaggagaaagcatagttagctctcgggcagctagctgtggcagacagcgtgctttgtccctcagatgagtcacaacaagcgcccttggcaggcaggaaggactttgaagtgtggtgccccaaagggctggtccaggaggcccctgcctagcccctgggcctgtcactcctgaatctccatcactggcccgagggcaggcccaggcttgaaataaactcaggccaagctggaggcgcaattagaaggaagagagccatttggctttttccaaaaggtaagaaggaggacttctcatttttgtgctttaaatatcaatgcactcttttgatgccattatttgcattttctgagttccactgttcttgggcaaaatccaatagcccagctctgaaggcctcttccacatacgtgcccctcccctggagaatccctcacaccttctttgagctaccaggccaagaaaattgtattgagctttacctcgtgaagtttgcattttaaaagcaagatgtgttttttcatctctaaatataaagttttcacattgaataagcttttccaaactatatgcccttcatctggatactctgtggaagcaaagggcagcatggctgggtggtgctgagtcgggcagagctctggtctgtgcatcgggagactggccactcaccagatgacttctgggagccaccattccttatctgaaagctggacagctgggggcctccataccttacatcctgcccaccttccacagagttgtcatcattgactgagttatgtctagagaagcactttgaaatgcttctccagcattccaggtcagaacagggtggcctaccccacccaaagctgcagaaagagaggggagcgtgggtccaggggagaggatgtgtggggtctaaagatgcccaagacagttcctggtgagacagcccaaaggaggcagcaggctagaaacttgcagaggaacaaggaagctgtgacaccttcttacctggggacctcaggacaggaagaaatcatgaaacattcttactgggaaagccagaggagctttcctagtatttttgttattggtaacagctgtgaggtgccccctcagtgccctggcaactgtcattgtcacagaccccaggaacatggggctttgggtacagtttgaccctctccctgagatggaagatctcccttaacacctccccccggggacttgagacaggggtggctcctttgctcggctgctgcactctaaccctttgtgggaaggggagcatgcaggtgagtgggtgcaggaggcagggcaagtgctcttgggctttggcaggaatgaaccccatacctgcccacaacaatgtctagtggttgcctgtgacctctagagcctcagagggtgtgagttacaaacagtgctcctttagtattttccatccgtggatgactaaatgttaaaccaggtcagtggaggatcagggcgacagccttttaccccctgtcctcttggtgcctgggttcttgtccgggatctaggaagaatcaggtcacacagatgtgaaggatggtgaatgcaaagattttattgagtggtggaaatagctctcagtaggatggggagcttgaaaggggatggagtgggaagataatcttcctctggagttcagccatcctcagccaaattcctgtccaaccatccccggctgaactcctctctgaccatagtctctgatgtccagctgcctcttctcctctcaatgttcagacacctcttctcttctctccttctctgccacgctgctctgctcctctgccagcggagcttggggttttcatgggagcatggtgagccaaaaggcaacatttgggcaggaaaacagggatgtgaagttttcatttagggccatgggtccaggcttgggggtggaacccttgccagggaccccactcttttcttccctgcctcctggccatatcatccccatgggtttactgcatcttattaaagaactactcacaatgacctcagatcattaataactcagcatctgaactctgacttcctgtctcctgctttttggatatattaatgccaatgtgtctgcctgtatgcaccaggggtttgattcccccttgcaaggtttttaggagatttagacagtgagtcttacaacagctgtgcccagtttttaaagatctcgcctcctggaggtgaaagcaaggggggtgtattcctaaaactatatcaccaacagtgtgaagggcctggtactttgcattatctcatttattcctcactacaccaccatggtgtggataatattaaatccattttacacagctaagaactgaggctcgggaaagttaaataacatggatcactggtggaccaggactcaactccagcctgtggagctctagaaaccaggtcattccttcgtgccctattgcctctctctgaatgcaaaggctaaagcagagtgaggaactcagcaatgagtaatggctcattgtgaagtggactccaggtggtgcctacggggcaggggcttatgtgcccataactgactccatctacctaccaagttctcattagggtcaaagcatgcgatcagagtcagaggctgggtttgagaacctgctccttttaccgaataatttcatccccatgctgtacgagcaaacttgactttgctgaccttatctgtagcatgaaaacccacacagggctgctacgaatacagaacgagataatgcaaataacgtgcttagcatggcatcttctctgaacacctcaggttggcttagggtctcccattctgtgcccccacagcactctctgcctcccttgaagcattcttccctcttatttatccatctgcttccaagctacctaatctcaggggccccatctggcctgctcaccactgagtgcacggccctgacagtgcctgacacctgggcagagatgtacacctctaatgctgatctgctgactggtgaccacggaaggaggcacagcagctacagctattgttactgcttccttcctcccccaaatatacttgatgcttcagtggcatctccctcctgccctccccatgccaggcacctccatcctcatcctctgagccttttctcccaagtccccttctcccaagtccccttctccccactgccctcagaccccctccccatctcggcctagaagccccccaaggcttggtcctcccttcagtctctcccagctcctgcccacagccttctcagaataactggatggctcttagtgacacctcagggtctggaagaggccagaattattctgatactactgcatgtatgtttttgagtctccagtccttgttggtgtgctgggcctctgtggcaggggtgggaacctgtgtcccctgccccctgcccaggcccagtgccaggctgcgcacagaggaggcttcaggatgagtctgttgggcagcagccagggtgcccacagttaagtttcaagggaggacttcagctgcacctttaaagaaaaaaattattatgctcacattcatttcacacccttgtgacaaaggacacatttccacgacctcatctgatcatcatcaaccaacctatgaggtcagcaggtaggacaggtctcccctttgaacagatggggaaacttagtcacagagtataacattatagagctagcagacaggagagcaaccacagatctgggtggggcatccatgatggtcaagaacaaacccgagagccagactggctggtgtgattcccagctcttccacttatagctttgtttccttggcaaattacttaacctccctatgcctcagttttcccttctttaaaatggacataatacttagttcataggctcattatgaggaataagtgagttatgatcttcaaagcaagtattaactgattacgtgcctggcagctagtaagcactgaatgttgtaaaataatgcaacctagacatgcatatggagttctttacactatgtcctctccttttgtacacttctgaacacatccacaatgagaaggaagggagtaaagtgtcacctatttttctgttacttaaggaaggctctagatatggcatgagcctctgacaatgggatgaggacctcattctttaaaactttcgttaaacatggtgaatttcctttatacatgaacattgtaggttcatgcctcttggcagagaagatgaatacaagctgaattacagtatctcaataagatggcagtgtttattgcaaatgctgcaacatcctgcttgagaaaactttgatttgtagtctggttctatgactccaccaaagctagacaattatccaagcagcacctgacctttttgactgtttatcttattggctggcagtggtccaggcctttaatattatgcttctcctcttgttcctggagctttgagaaagataatgaaatgagttgagcgccacgtgcaacgtggctggctaggagactctgctggatagtgcaattggaagggacacctccgtgtgcttccaggggcctgggccagacctgactgggagctctagagaacagaagcccaccagctggaagaggcaggcaggaggtggcactgcaggcggtgtgaatgtgaacagcaaagggtttgctgtcccaggcctcactctgccacttgctgctgtgtgaccctaagcaaagcctttaacctctctgagtctcagtagtcctatctgtgaaatgagaattttaatgctggctctgacgacttcacatgtgaaactgacctataaatcttcaagtgcacactgatgttgttgtaatctggagataagcagcaatctactagcaatagccttgcatcgccattcagctttcatcctccgaaccagacttgtaggcccccagtgccagtgggagccctggtggtctggtctcacggtcaacaggaaggtctgctgtgccaccgccaccaccactagaacatcgctcccttcaaggatttattccttaggttatgatttaagccatatcaattataataccttaggaataataggtccattaatttttttcctacctatttgaccctctgctatgagcaaggttatttgctttgttttgcttttgtttttgggtagggatgcgagctgaaagagatagacagatcatgaggatcttcaagttaggggcattagaatagcactgtggggcagggcagagggacttgtgtgtgtaggcagcagcacacagatacggggctaggacgtaggcctggagtgatgagggtcaaccacagtcttcccaacatttcctggaggtcaacctgcttttaacagccttcattcttttccaactagtgtctcgctgccctgccccaaaatcaaggtgaagcagatactactccaggccaaagacacatctcctatgactgaccttctggtcttggccacacagctgactagctgcttgtgtcattggacgagtgacttcccctcttgtgtcaaggtgcgctgcagagggatggcgttggaggcaggagtgagcgcggagctgtgaggacccagggaggagggtttagaagtcaaggaggaagctgcaggcacgtgactcctgcactggcctcacctctcaccagctctgcaaggcccggagctgccatcccaaggctgcttttcctttcctttctttttttaaaattctttaattaaacttttttgattaagtgacagcttttaccactcctggcagctgctgcgagacaagataatttatagatgcattgacactatatgattaggaaagtacagtaaataacagatgagaagatgactcgtgcaacctgcagggcccctcctccatctctccagtccagcccccaccatctcccagtgagccccaggtagacgtctgccacatcactcaggggctgcgtggagcactcggtgcctttcccaccacaagatgacgaagatgtggtgttgacagactgctggtgtccgtggaccacagctctgctctggggccccagggactttctcagagatgcctgtttccacctagaggaaagacttaatgattctcacccttgaaagtgtgtacagaaatcctctagtcagaatgtccttgctgtgtaccagggcacactgtgggctccgtccagccaggcagggcctggactcaggatcccctaggctggtcacctctggttgtgggcgcttcatccatttccctgtggatgccataaaagcactgtccctttctctgtgtgccacactatggaaaaggttgagaatcaccgctagtccactccggggcctgtagcaaggagagtaattgaagtgccccgggaaactcgagccgtgtccttagctcttcagcactgccggagccccatgctcctcaggaatgagcccctggccttttcctcacagtaactaagagcgctcatgggggcagcctagcctgtctttctgggtgaagcacatctcctcctgtcctcttgtctaccctaacattccacgtgttcctttctcagggtaaaggccaccctcttcttaggagccccgcacccaagccaggcattttgcatgggaagcagtgccctgtgtacttacaatcagtattgtctaggcaagattaaatcagtgacattcaaccgtatacaatcctgcatgatcagacgatttgttggaaggcaggattcgagttcctctcagaagctggcttgctgtgcacgcctctcctaacatggactctcctcaagtgcccaggcagaaagcggccagctcccagccagatgcatggggggccctgggttccagaagatcaagtggccaagcacatgaagacaaatagtttgtctcgtcagcttctgggggtcacttgttcacatgggaagaaaccaagcagtggaggttaccatagaaagattacacagccaaagtttgtggctggattttttttgtggcttttctttgtgaagagttaagcatgaaggaccgagggtatccaggaagaagagtagctttgggattatcaggaaggatccacgtacatgtttctgacttcttctcaaattgcctggagcagtgcacaggacatagtagatctttccataaacactgctaaactgcacaaggaacttattctgttaagggagctccctacctctgtttccccacctgacaggcatgctagtttagactccttcgaggataactcggctactccctgtgggatatctggaaagaatacggacgggatatagatacattctactgatccaagtcactttaaattttttaaaaattttaaataattataggttcataggaagtttcaaaggtagcacagaggcagtgcccttcacccagtttcccccaatagtcacaccatatgtacataacgatggcacagtatcaaaaccaggaaactgactttggaacaacgtgcatgtatagttctgtgttgttttatcatatgtaggttcatgtgaccactgccgcagatgcagaacagttccttcgctatggagatcttccccgtgtgcacatttagacacacccacccttcctcctcatcatccctaacccctggcaactacttatttgttctccatctctataattttgtcatttcaagaatgttatataaatggcttttcttgcgtttctgtggattcgttgaacattttttagaactccatttttatctacctctagtgtttttgagtatatctcttcgtgtagctgttttgtggttgctctaagtattacattatatatacataatttatcagtctactggtactacttttttccagcccaaatgaagtgtgtctgtctcacttttatcctcacccatttatgatagaattgccttaggtatttcctccacacacatgagaaatgcatgtgttacgatttttgcttcaactgtcaaaatttagaaaactctagaggagacagaaagtgtattcatttgcccatattcttgctctttctgttcttccttacttcctgataacccaagattccttaaaaaaatcatttcctttctgcttagagaacttccttttgccattcttttagtgtaggtctgttggtgaccaagtctattagttttctttcatctgtgaaaatacctttatttccccttcatttgtgaagaatatttgcactggatatataatttggttgacactttccttcattaggcacttgcaaaatggtatgctacctctttctaatactcctggtttctgatgagaaatatgctgtcatttgaattattttcccccctgggcaaggtgacatttcccttgcactactctcaagatattttctttgactttggttttcaagggtttgactgtgatatatcttggtgtggatttctttgggcttatcctattttggcttcactgagcttcttgaatctgtaggtttatgtcttttgctaagaaattttcagccattatttctttgagtactttttcagccccatcctcctctttctctccttctggaactctgatgacatggatgttagagcatttgttataatcccacaggccacccaactctgctcactttttaaagattattttctctccattccttatattaggtaatttctattattctaccttcaagttcattgattccttccttcgttgtctataatctactattgagcccattcattgagttttgaaatttcatttattgttctttttacttttaaaatgttcatttagccttctttatgtcttccatttttttactgaggctctgtttctttgctgagactttctgcatttccacggtttcaagcctgcttgtaattgcttgttgcagcattttacagtagccacctaaacatttttgtcagataattctaacatctgggttatctcagtgctagtgtcatccaagtgccttttctcattcaagttggtgctttcctgttcttggtatgaggaatgatttccaattggaacctggatgttctgggtattatgcagctccggatgttatctgaagccttcccttacagctgctttcctttgccactgacccagcagggaggagggatgccaccatcttgctattccagtaagggtggaagtcaggttcccactcggcccccatcagcactcagtgaggcagggcctcctcattactgctggcgtggctcaggctcactgccagacctctgctgataccaccctggctggaggcagaggggagcctcgttactgcctcaccgacaccgcagcgagggagaggcctcattaccacatggtgaatgtcctggcgctcccttagacctcctctgacaccacttcggcagggaaaggggggcacacctcattactgcctagttggggtggaagttcagttttctcacatcgtctccaccgacaccatgtgggtactggggagcctcatcatgacccagtgggaaggaacgtccttttgataatagccgtcctgataagtgtgcagtggacatcgtctccaccgacaccatgtgggtactggggagcttcatcatgacccagtgggaaggaacgtccttttgataatagccgtcctgataagtgtgcagtggacatcgtctccaccgacaccatgtgggtactggggagcctcatcatgacccagtgggaaggaacgtccttttgataatagccgtcctgataagtgtgcagtggacatcgtctccaccgacaccatgtgggtactggggagcctcatcatgacccagtgggaaggaacgtccttttgataatagccgtcctgataagtgtgcggtggacatcgtctccactgacaccatgtgggtactggggagcctcatcatgacccagtgggaaggaatgtccttttgataatagccgtcctgataagtgtgcagtggtattgatttgcatttccctaatgactagtgatgtcgagcatcttttcatgtgcatattggccatttgtagatctttagagaaatgtctattcaaatcctttgcttatttttatattaagacagaaaatgttagacaataactattctcctccagccaaacaccacaagaaacactgcggcttcacccactcttcccccagcaaaggccaagtggggaacctcaacgtccatcctcatcaggctgtaacaaggcaccccaactcttttgccggggtggcatcaagacaggtggggaaccaggaatttccaacacacgctacaacatgggtgaaccttgaaaacattatgctaagtaaaataagccagacacaaaagaacaaatattacatggttccacttacgtgaggtacccagactaggcaaattcacagagacaaagagtagaattgtagtttccagggattggagggaagggatcatggggatttattatttattaaatacagagtttcagtttgggaggatgaaaaagctcaggagatgggtggtgataattgcacaacaatgtaaatgtgcttaatgccactgaatgctacacttaaaaatggctaacgcagtaaattttatgttatgtatattttaccacagttttacaaagtctgggtcttgctagacttcccctttcctgggcttttggctaacgagaggaggctctaattggggcttttttttttttttggtctgtaccttttgatgtttctgggttccccaggaatccagagaactctgctatgttattcctcaggtcctggggttcccttctggtctactgcttctctcctcttttagagtctttttatgtttcttttacatataacgtacagggattttggttgcacttagtagggaaagatgtgtctactccatctttctggaagcagaagtctccaggccactttatgtgaagagttttgtccacatttcatttctttttgctcactagtgaagtcttattcatttcaatttagtatataaaacttatagctgaaaaatatatttcattttcatggaaaaggactcctacttctgaaaccttgcattgatatttctagacatttccagggcaccagtcataacatcaagtaagaagcctattgccatcctccgtgacatccccttcctcaatatctcttttgcccaatgttgcaataatactaatcccaggtgtgttgactagtgccactcataatcacattagtttatcctacttatgctgatccttgtcttcttgtcctgttagtgtcttcagctcgtggctctgttccttttacactcttgttagcacatgtgatcatacacacttacattggacttgtccttttgtcctcatgataactgctgactgttaaaacacttcttggatgaagcaccctgatgtagcaccctggtaaaagcaatgggctttgaattgggatgtttgggttccgacctagttttgccactaatcagctgatcgtctccttcccctagatgtttagcctcagacccctcaccactaaagtgacaggtgtagaactagatcatccctagggacccatcctctgggaagtatcttcaggttcaggctagtcagctctgataaagtcaagagcaccgtcagaccaggaggttgagaatggaggtatcaccgtaggtgtgccctccttgatgagtttttgctgatggatatattaaccagcagtggacggtcactacaggtagaatcttcaacgagactcctattttaggtttctcaccataatttcttaatttttgttggcaattgtgcttgaagcaaaaaccaaattagaaatgatgtttgtctgttgttccccttgaagttaggtgccttgattgcgggtcctctttctgtctgccacttcctcgcagtcccccccaaaccccttatagtcctccctgaagctgcagtgttcaccctagcaaggcaagtacctgtgctcccttggtgcctcccatggcacttgtgccaaatgcaagaaagaggagccaacgcagggcccgctgcccagcaggggaggtggaggcaacgcaggtgtgatgtacacagtccctctcaggtcagggaggagagggaagtagggctaggaggaaaatggggcaggagaggaagggagagcacaagggagaactagtggaagggagaggtggatgagcaggacagctcggagagacaggaacgcaaacagaggagaattttcgctcggggtgggaatgaatcatcctcacctgccagccgcgggcctcagcaagctggcagcttcgtcctctcagactgtgggttgcttttagctgtcagccttggatggtgggctcatgcattctgttcccactccaatctgccagagggacagggtccttccccgcagcactgaggcttggccagtcgtgatgcctatggcgaccgcagaatcgacctcaacgagctcgtcgccgggcaccgttttagcagccccaccacccatttttggaaacacaaccctggcctcccattcacagcagaaaagggcacaaggcccttcgtgtcccaccacctcccttctctctggaatcactgtggctctggttgtggaagtttgtcatgagtggaccccagcaaggaattggtgcatgatatagttttcgttttcaaaggaccatgatttccatggattactttgtgcaaaggatgccaaaaccaaatatttaaagtaaatgaggaaaaaatatgcttggagtaaaaagcatctggaccctgtgcatgtgcgtgtgcatgcgtgtgtgtgttccaggagctgactctagctgtgaggatggctcgcctgtgtgtgtgtgtgtgtgcatgcgtgtgtgtgttccaggagctgactctagctgtgaggatggctcgcctgtgtgtgtgtgtgtgcgtgcacgcatgtgtgtgtgtgcatgcgtgtgtgtattccaggagctgactctagttgtcaggatggctcccctgtgtgtgtatatgtgtgtgtgtgcgtgtgcatgtgcgtgtgtgtgtttcaggagctgaccctggctgtgaggatggccttcctatccttcccttctcctggctgccctatccttcccttctcctggctgcctcccattgtgacatggatttttctctcatctttctctccctactccccttgcagcatgagaggcccagtacctgtaagactaccaggctccatcactctccagagaggccagttctgcctcttaggaagggcctagatcagcgcaaatctcaccatcatgatgtccccaactgctccgcccgtgtatgtgttgggtatttccaactgtccccagcaaagcctgcctcctccccacctcctgagccctgtggggtatcaggagcctcaccactcgagcggggaagaaggacagagcagcagcctcagcccacagcagccctgcggtggagagctgcaatgaaggcaggccttatatagacaggaaaagcagggtgactggaagtactcagtcacgggcagagtcagagccctaggacctttagggacaaggcaggtgaaagacctgttagaattagggagtgaggggctggaggtggggggtacactggaatgttacggttctatttttcgctgagtgaaaaccactaacaacaactacagaagccctgctccttctgtgggctaaaatggcactgctggctgtgtgttcagagcagctaagaaccaggaggaacagagcccttgcctctgttcctagtccccgggccctggccttgccggagtcaccggaggcaaccaagagcccctcgttcagaaagcagccatgaggtagcctggccaccctttcaccttttacaccagggagcccagaggtttccagggcttgctgaagggaatccaataagaagaagatttcagatcctcaggtgtgtgcaggggattagcccagcgctgctgtctgtccaccctgaggctcctcccccatcctcaggattgctgggctggaggcagaaagctgcaccatccttctgaagctctgccccaaaggaattgcagatgtctgcttcctttcatttggggagagaagtcggaggcacaggggccatgaaaggggaaggcgtttgacttagatagcctctccctcctggctgtccctctgagctgtcctgtggagccaggaagaggctttctgggccccagagctgtcttcttgctcgagctaggccctggctccccacgcccaagaccccggctccccacgcccaagccccccccatgcccacctgccactccactgcccttagctcgttacccctgtggctgtggaggtccctcaggaaaagcagctccccaggcaggggtcccttccttccctcaccacagccccagccccactgcaggacgcccaggataccacaaaggccccccacaatccctgctggcaaggccgtccttccacagcacacaccggagaggccttctctatgtgcctcgataacctcagacctggcttcttagagaaacgggtcaggcagtgacgtttgtggctttgtactccattaagtgctcttcaggccctccctggatcttttgagatcatggggataaggggcggtgcccagcagacctggctgcttaaaccatggtctccaggagataagagatgcataagctccaggagcccagcagtgagacaggcgcccccgcggccagaggctcacactgtatgctttgctttagggctcgggagaaagcacattgagctgcgagtgagtaagtttgccctatctctgtcattaattcaatttaattcagtcacctccgcttcatagtaagtgctcagtaaatcatctcacttttttttgaaccagagaataaatatattgatcaatatgtaaataaatagatatttaagagatgcctatacaatggatttgctgagttttcaaactattgaaatcaggaggaaggggctatgctggaggaataaacgtgtctgaatgtaggtttgtctcatgttgagtacgtagcagagaacctattctacgggatagaattgtggaataaatgacatgagggcacactgagaaaagactctgaaaagcatgcaactctgtccaagcctaacaattcaaaatgtaagtaaaatttatgatataagtgaattggctgctagaaagatactctcataaaataagctggttcttgggccgacccaatgcttttttgttttcttgagaaggagtctcgctctgtcgcccaggctggagtgcagtggcgtgatctcggctcactgcaacctccgcctcctgggttcaagtgattctcctgcctaaacttcccacgtacctgggactacaggtgtgtaccaccacgcccagctaatttttgtatttttactaaagacgtgtttcaccatgttgaccaggctggtcttgaactcctgacctcaggtgatccacccgcctcagcctcccaaaatggtgggattacaggcgtgagccaccacacccagcctacccaatgctttttgaatgactgcatgaacaaatgaaagcaatttgataaagcgtgaatgactctaccatctatcctatccccataggccccctcccccaacactcttcccctcctcagtttgaattgccatgtgaatttattgctcctgccaaatgaagtcagctgagatggaaatgttaatttattggaccagacatgtgtcaacagagctctgataaaatgcagcgacatgctgttccaaagcccgctatcccgaaacctcctaccatcctgctgcaaaactgctgtgtttgaggtttcacagcccctctggctgggtctggccgccgtcctaccatctcactcaagtcccgccgtccctccataacctcatgtgagacacacgggtccccaaagccaacctgacctttcccacctgcatctttgctcaccatggtccttccacggagaaggccctccactgccatttaggccattggaactcttctgtcctttaaggcccagctcaaatgcctcccgttcctgagctagaggtgagcttcccttcctcttccccaggcacttctttgttagggaacaggagttttcctctcctgctagactataagctccttaaaagctgagaccatctgatgagtttttaaataaccccccacccaaggctgcccccaaaactcaaatcagtgccttgcatagcagggatgcaacattaggcagtgcagagagagtgggattcagagtaagactggcccaagtcctatcccgtctccgttatttgctggccgtgggacccgggataagtggcgtaatctctgagttttagttgccttatctgtaagatggggatgacactagtcacccgtgttccaagtgtcacttgatttactgtctgcacatggcactcactcaggacatagctgcctgtctctgtattctcctcactccactagagcccatcattttcaatatttcttttaaaaggactagcacttaagcaacacaaacttcccattccttttgtggctcagaatttgggaatgggaattttactgagatcatcaaaggtgaagtcgtacataagccatgaggcagacaccagcttcccgtggatggccggattttgattgcctgtgcttagtgggaacagaagggaagggaaggacctgggaggcctggataggaactaagttcagctggtgtctttatgcctgcgtcaggcttcccacctaccagtgtcaaaggaagggcagcgtcctttgagatgtcaacagctattctgagatttttaaaaaatgaaagggttctgtgttccgggtgtcagctgactgcagcctctacctctgattgagtgtcacagggcatacgagctcattaaaggctctgagaagtcctgtagcaaagaaacctttggactttgcttaacccagtgtttcccaagttttttgtaccccttactgaatgtgggcagccctgagctggagatgtcacttctagccagagggcagtcaggtgtctgccggggagaccctggcttcagttggacaggggtgctgggatcacgggctttctttctcccaagaactggcccaaaggccagttcttttcccaggggacccaaaacagggcttaccgcctcctggagtcaggtatgagtcatgcccaccgggctctcttccccaaggcacccgacacggtctgtgtgtgccatgggctcctgttccataggcacgcacaccctcttctgctgggcagatacctctgtggcatgcgagtgtgggacctgaacccaggttctgtcagggtggcgagggggctcacgcagaggatccacttttctgtcttgctcttgtatgttttctcttcctatttgcctttttattctcctttgtatttttaaatgttcctctctagtaatttttgctagtcttttttatctctcaccttgtttcttccactgtgagtaggctcaaccattcgcctgttgtcctatgagccacatccacgcttttctacctacgtttccaaacttgagcctggccggtacactgacttccaagcctcccgtggaggccgcgcagcgcccctgtagtgccccatggcagcaagctggtgacctgagctgtgatcatgaaaaggaaatattcagcttttcttccaagtggaaatactttatgtattttctccaaggccacagaaaatgaaaataaaaaacagtactggcagcaggaataacaccaccgtcccaagaagaagaaatgaaaacagtgacacactctgtggctgccgctctcctctgagttggtcaagcagaggccctggggaggcagaggtcggacagtggtgaccgtcagtggcagttacagccctgtgtgttcggggccttcctgcttgatgtgaccagagctgagcttggcggctctcattgagcagctaatgcaggagtccccgccatggtggcctcgtcccccagcccctctctgtctttgcttctctctttgcctacctttctctcctccaagtgtggtcaacctgccctttccctggccagctcttatcaggcaccccttccccgcatttcccggccacccttctcttatgcgctgggtgactctcagtgctgactgcaggcttctcttcctgctccttcctctccccttccctttctgtcctctcagaggagcccaggtttcaggctttgctgaggtgagggtgtgggggcgggacctcttcacgtgtatcctcaagctggtcccttcttgtcctgcgggtcccagctccagtgcctccttctcagagaggcctctctcagccctggttgttttcctttgacagctcatcgctattttagaaaggtcttatttgttcactcatttaccgtccttcccacctgcgtgcacctccgtgacagcacccttcctttatggctcgctttctctttcttctcttgttccccactctatttcgtgggcctggaaagtatcaggcacattggagatgctctatcggaaaggaaaaggaatgaaagaatggaaggagtggtggaagaaaaggaaggagggaaggaaggagggaggaaaagagaggggaagggaggaagaaaaaagagaaggaaggaaggagtgggggacgattgtaatatttataagttttaacccaatagggtagctgctaccgtctccattttatagaggggaaactaaggcacagtgcttaaggaatttgtcccaggtcaaaccactagtaagtggcagcacctggctccagaaccagtctgtctccagactctgggctcaaccaccacgctctgagcctgcagtaagatgtacaaggcagaagtcctgtgggtgacaattgggactccacccaccatgccagggaacgtctccatcagaagtgggagaagaggagttaatttttacttgacactgactgtggaagtcattatctcagacacaatttcacttcgttttcatcacaaccctctgaaaaggaccctttacaaacgaggactctaagaatcagagaggctaagggactggccagagttcacacaactagcaagaagcagaggccggattcgaacccagctcttctagctccacatccggagtgttcacattcctcatgctacttggcttttcatcacagacagtcctttagatgttagtgactgcctctccctgttgtggaaagtcttgttccgtacacacctctcttaaacatgcttgcagtggatcaagtgtgctgttgcagtcacttctatacaatgtggagcagccagtcctctggcaaggatgtcgctttggtccaatggtgaaatcagacctagctcatgtcatgctgatgtagaaggccttctcctaaaagtggccgtttccatgcgtggggagactccttgtagctagcccatactctgcgatgcgggttgtatctgtggctcccgcccggtgatgtcctgtcatgatcagcttccagcagttgtgacccacttgcagtcattcaccttcacctcatgggcctgcacggtagtggctacagacacccacaacaggttcagtggatctcaactctggctgacagtgcttgtgggtgcttttaaaaacgctaatgcctggggcccttccctggccgctgtttaccttgtctctggggatagggcccaggcagtttgttaaaaattcccaggaggtacgcgccaaggacctctttctggcctgtcggatcaaggggccctgtgcgtgtgctgcagtctgtttggtggcatgtgactggctgcaaggtggtccaggcggatgacaagggagaggtaatgatgctgttaatcagaaacattaatctgtgctaatgtatcatccctcccaggtagcagaacgttctcattcagttaaaaatctcatctccttgaaaaggcccttgagaagtgagtgatgtgaatgctgacagttttggaaaccagagagagattttgggcaggagacttttcactgtgctccaattcccccctgcaggtggctacccctcccgcctgtagcaataaagattgacacaggaatggcaaggggggcctcccagagcagacattcttctagctgcatattcagcaaatacctgtgcggggcctcccaggtacaggtgctgggctcagcagggacttcagtggagaccaaaaccaggtgcagttcctgctgttactgggcttacatcaagcagaggaagttgaccttacttaagtgattctttcccacaggatgagggagccgctccctctctgcttttgggtccctgtctaaccttctgcctcagctcgctcagctgcatagacagataggcagaaccctagcattacggcaggcatctcccaggctggcttctcctgggctgcgggtggcctttgattttggagcctctgctgccccacagtgctccccacctcccacctcttttgcctttggatggggtcttccacatttcagatggctataaatacaacaggtgcaagttcagacgctccaaggagagcaaccactgccattgggttgtgcagtaaggtgtgaatgactaacatcgaatctgtcctgagagtaggttttagtagagagagagaacctggcagagttgcgggcctgacgagggcaggggaagagcctgtaaaacaagccctgcccacagcagactgttgctcagttaggccagagccctgtggaggagatgagtgtttgagtgaggagagagaggaggaggagggcaggaagaggaggaaaaggctcttgtgttatgttccagttatgcaccacaaggactgcatcatcccgggaagggcccaggatccctcctccagcaagtaaaatgagtttcaaagagcacttgggcaatcctgatcagtgggactcacctttgcctgcagggagctgacacccctggacaactggccagtggagcctctagggaggtggggtcctacaacctgacacgagccaggtttagcctcagatgcagcccatgctgacccccagtgggagcatgctgacccccagctccactgcttgtagaggggattgggagctgaggggttctttacctcctggagtcacagagccccttatggtctgttggaagttacagacccctatggaaacatacaaacaaatgtgtacatgcagcactatatgtgattttacattataaaataagcactaggagggagcaaaaggatggggtgttcattttacagattagaaaactgaggccctccggggcataacgccttcctgcaaccctaggcctctctgcctgtattaggccattgttgcgttgctgtagagaaatacctgaggctgggtaatttataagaaaagaggtttcgttggctcacagttctgcaggttgtaaaggaaactcagcaccagcgtcagcttctgatgaggcctcaggaagcttccaatcatggcagaaggtgaagggggagcaggaaatgtcacatggcaagattgggagcaagagagagggagggaggaggtgtcacacacttttaaacaaccagatctcatgagaactccctatcccaaggacagcaccaagacatgagggatccaccgccacggcctgaacacccccaccaggcccacctccagtcctccagtgttggggatgacatttcaacatgagatttgagggacagatatctgaactatagcaccaccatgccagttccctttctttctgtcatcccagatctaccatgaatcatgtgtcacatcaaattagactcgttagggcataagcaggggccccgcagtccagaatgttccaaataaattgagacttgtccatctgtgtgtcctgatttgggggttcaaagaatagtccctctagacaggggcacaaacccttccttcacacacagtaggcccttgaggaatagtggttgcagcaataaagaagagaagagaattctcaagggtgtatgtggcctctccccctaagagattttgactctgcaatccaacctcaaccacacgggagagagggcagccagtgctgaggctggatgggggcttcatacctgtgtcatcatgggtgccggggcccagcctgccctgtgctagggtcacttccacaccatctctgtacccgccaccagtctccaatttggcccacattgcactttcagccttgctctggccctgccaagcttttcgtaatggggtcactttggccatggcctcacccctctggatgtcaggacaacgcagccagacagggtaatcagacttaggcaaaatggtgtgtgtgtgtgtgtgtgtgtgtgtgtgtgtgtgtgtgtgtgtgtagggggagggagcattcaacagggagagaataccagataataaagagctacagagccaacagggacatggagccactcccactaactgaacctccctcctctttccctccatccttggaagttgcgttccagccagctgccactgttaattcatatgagagattggaccagggagatgccaccaggctttcacccccgctgtgatgctgaggctgtgggagggatggtgtggttgactggggccaccttcattagacagagctgccatcctgataaaggaaaggcttcttgtctcagagctgtgtcctcccactggcttttctccctgcatgctgtaactggtcatctcagtcctgaagcaggtatgtgtgttgggccaaggtggaaggagagtgacactgttattaaattaacccagtccctttcattgcatcctccaagtgaagaacaaaagggattttgcatttgcccacagtgtctctctaagcaaggtctctggaacatctgtaggaactcagagacgtttggaatgggccaataaaacatggtgagcatccagcagcagcctggggtgctgggcagagccgggacctgggtaggaatcacagcaggattccagccctggctctgcgccttgcattgctctcacctggcttccatatctggaggaacatacctatttctcacgatcactgtgaagatggaatggggttttgtatttgaagctctgtgtgcagttctggagccccgaatgtccttgggggtgctctgaaaccttagtgcctttatctcttctaatggtaggaaatgcacccttattttagtcagatcctgtgaattaaattttaaaatggccataatagctaagaaggtaaactattagtgactaactaagttgaagtctccatcagtgtcaagaagacagtttcatttgctgttacataaagttttcagattgtttttctcatacttccaacccaaacgtgcagaatatttaaagcttagcaaaaaaaattatagggaacttagaaatatataaaacatgtgatgattgtaattttcttgtgttaactgggtttgcaactattttgctaggataatctgcccaattaacctctcatataacttctgaaacttgtttcatagaacacgtaagggcaaaggaaaagcaagactcagtcaatgtctgaagcaaactggagtcaatgaggcaatgcctgcttagaactttgcacgcttgaagtttcatactgttaattaaatctgcctcaattcttttttgagggacaaatgggattcaccatgggaaagagagttatctgagaggaacatcccagattggagaaggaagaggtcaactcagcccaactagagtagtccaacagtttaattctatctcactacaacataagcgttctgtcaggtgagcctgctaagttcctttcctctcttctcttgggtctgtaagagtatcgcaattctggccggacacagtggctcacacctgtaatcccagcgttttgggaggccgaggtgggtagatcatgaggttaggagatccagaccatcctgtccaatatggtgaaaccctgtctctaccaaaatacaaaaaattagctgggtgtggtggtgtgcacctgtagtcccagctacttgggagtctgtggcaggggaatcgcttgaacctgggaggcagaggttgcagtgagccaagatcatgccactgcactccagcatggtgacagagcaagactctgtctcaacaaaaaaaaaaaagcatcgcaattctctgtctcttgtcatggccatgctaggacatgggcaacctggtagtgaacaaaatacctttctctgttcctccactcagggaaatctactaatacttggttagactttaatttttcaattttgcaatctagaaacagaaaatacccataaatatcccaaaatagaaacaaaatgcggcccattcagtttccaaaaagtaaacaaagtgattcttcctccatgagatgcctgaatacattcatagttggctaattaaactaccatagaaacaattattcaatataggaggagaaagagaggaggaggaaggagcgggagcattagcagacatacatggcttttggctaggaagatagctgttacaggccagtggaatggagggaaaataacccacggagggcagaatcatttctgcagacaagtctatgaaccaagctgagccttcgtccttttttaccaatagagtttcccttctttccccttggtgcctccccagccatctgtaggaagaggatcccaacaagccttccttcaagtcagtttcagagcatttctgccctacaaggacctgggtatatcttggatgccttgggaggctcattgaagtaccataggatggccatgttttccaggtcatctgagataaccccagcataatcacctgtgtcccccacaaaattattaatagttgccctctttagctctctaaagtgcccttgtttgagtgctaactcgtgtggccagtccacataccctgcagggagggtaaagggcaccaccttatgtgtcagcgctgactggcagcagctgctggagtgctgtgttgaggagggttctgcagtcgtgttgtggctcagcaagcaaagccctggcaatgggttaactgcagcggcccgtggggcaagtgagggagaggcagcactccctgccggcacagaacaaacgctggccaggtcagggtgtgggtttcaggccagctctgctcctagcttcctgtcatctgagtgggatcgtttcccttctctgatgttggaccaagatacctgaagttttctttcaattccataattcgaatctcgtcctccatcgaggattagcttggaagggagctccgatgtcatctagcatgatttcccactccctccatctagtgggggattgtgcaagataacatccgagctcccttccaaccctagaatcgtgtgatcctatggtaactttgtgagagggccctctctgctccagagtgaagctgcactttgggacggatgtcagctagtatctagtattctcatggtgcgttttatagttgacagagcacttgcatgtatctgaccacagtcacatgactctggctttattttcatcatcttcattttataggtgaagaaattaaagctaagtaaaggccaagtaaaggggactctgggctcaaactgcctgggttcaagcacttgccgtagctctcacaatatgtgtggtttgggcaagttaatctctcagtgtctcagtaccttcatcggtaggatggggtaatatacttacatcataatgatgtttcgaggattaaatgaaacgattcatgcaagctgcttgggacactggttggaatatagaacacatgtaataaaatgagttgatagagtgagtggtagaggtggtggaggtagcaattaacagcagtggtagtagtatagtagttacacccagcaagtaaatggcataactgggactcttctcagaaactgaccccacagtctgtatgtgaccccagtgaccccagaatttactgcgctgtgtctaccttaggatttatatccacaggtcagaagcagcaggcaaggtaatgagaaaaataaagatgatgtttaaagagatgttttccccatctagccctgagagagtattggctggggagctgaaattctcccctcctcaacctccgataatctggtaaggtcagtggcaggtgcagggtgcttgttatgccattgctgtactatgggctcatggcaggtggctgaatggacaagctcgtgctccctcccgctccccctcccctcctcttgggagagactgcctgcgatgtcagtgtttcttcagtaacccgcgcacattatgtggttccatatggatcagtaaatttcccccaatctctgtattacaaggtctggtgcctcattaatggcgtcttcagcgccacaagctgaggctaacagctctgtgtttttccatcttcagtgggtctgcacacattttcagcaatttgcaggaaagacctcaattagccaaattcctacgtgactcagtgaaggcattcagaatgcactcagctgtccatcctcaggtggagaggggtgatctgagaggtccagagaagaggcagaaagaaaaagcaagcggggagaggaaaagtcaagggggagggagggaaaacggggagaaggtgagagaaaccacagcagatgtggaggagcgtgtgtgaggacatggttattttcacccagcatgagacagattcacttctttcttggatgtttggtgtcttggctaaaaatatgtcaactgaatgttgtctcagggacagggagatggagagcattaggacactttgcagaaagctcaggcctggaacggggctttctttcacatgtgggtagggggtgagtgcttgggctatgctgagagtggggcccagagcatcgacagtgcagaaactcacttctccaagagcttcagcagctccaggacccttctgcctgcctccctctcccaattccattgtgaagtggcaaagtctgttccaggtactgtgtcctgtgggagggtgaggaggaagttgaggaaacctctctcccagagactgagctggcagaggccatgggcatgggcgctgataagggccaggaagcggggagggtcctaacaccatgacaaggccaggtccttgtctgcagtgtcacagggctgtggtcctctattggccaacagtagctcctctgcacctggaggaggacgtggggcccactggactcacctgggcgactgtctgcactgtgggagggaaggagagtccagaggtctggtcagggactgaagcatggcatgaggcagccctggggctaatgcaggccctggctgtcacattccccagggagggataggcccggaatcattgctaggtagcatagaaacctaacacaccaaaagcagagaattgggtaaataaattatagtacagctattcctgctactagaatgctataaggttattggaaatgatattgtagacaaaatttgacagtgtattaaatgtttaaaagctgttgttaagcaaaaatagggaatataaaatgatacgaacagtataatcgcaattttggaaaaatacacacaaaggaagtagattaatcatataagcgaaaatgtcagcaacagtagcttcaaggaagtggaatactgctccttttccttttcctgttttttgggtgggtgtctcagagttttcttaaatttataacatagaatttgttatttggctattagaaaataaaattatcgagattataagaaataattgggacaacagcaagtcacattttgctgacttcttattggccatttgagaaaactgaaccaaaggattaaaccatgagagcagggaaccctggtccttacctttacaatataaccttttgcagccagtctttagaggtgtggctttaaatgcacttacctcatttccagcctgggcttcatgctctcctcatttgcaatgctaagctttttatctattttcccctcaaagctttgtagttcactttaaagactttactgaaggtggaaaagcatgggaagcctggattatccaatcccaatgcctgggacaaatgaaaggtcacaagaatgagaagaaaaagtttccagagggtttttagaaagccccaagagacttgggaagtcaagtaataatttggcaggaggggtcttccttgctttggtttgggtgtgcctctttggatttcgtggtattcttgttgggggaacagatgactatgttcctcatattctcgaaggcatttgtggtgggactgagaaattagcccagtcctcatggaagagaatgagagagtaggatacagctcagagctgggggcagggaacactggtgagaactaacccagcacagttattttcatatacccactgaatttccaaatcttatcaatcaatgagcagtacatacgcccaccctgtgcaaaatactgggttaaaaactggggggtctaaatatgatacatgcctttgccgtgaaggactggcaatctaattgagaaggtaataaacccatctgaagttaatattatcagaaataattgacaacagtgtgtgagagatgccacaaggtgagtagtacatgattaagtgccaagagagtggcatagacagtgagtgctgggtctgtaagaatgggtaaaatctgaggatacatgcagtagatacttcaggtctgggggaaataatacaggtaaattcttacagataggaaagcccaagctgtatttgaaaggcagtagaagggtttaggatgcccatgaaaattgtggtcagaaaggtgatatatcagttagcttgtgctgcgtaacaaactacccggatacttagtggctttaaacaaccaccatttattaacttacatttctgcaggttggtaatctggattggctcagttgagcagttcttctggacctagcagggctccactgatcttggtttggtgttcaagtgtctgctgtcagctggtggtttgctagagataggcagttcatagtggcattggctgatatggctgggatggctgggatgtcctctttccacatggcctctcattctttagcaggctttcttggcttgtttgtgtgatggaagaaaagttctcagtgtgagaggagaagctgcaaggcttcacgtggcctacgcttagctgttgcacattattccaccatattcttttggtcaaagcaagtgacaaagtcagctcagattgaagagatgaggaaatagactctgattctggaaaagaagagctgcaaaatatcgtggccatttttgccatcttccacagatgggttggttggattgggtgccagaccaaagaaccctttagtaggaaggacatagaaaggatgtaatgagctagagagtgggaaggacctgtgcttcccagtgccagtctgccgacctgtgccaatctgcaatgaaggtttatcagcctgcagttagaggagaaaaacaggaagggtgcattgtgtacatgccagggacggggatggggatggtagtggggttttcagctgttctttattctagtattgcttctccttcctttcatgaaatgaaaaggataacaaatgatcattgttatttttaatatattattggcagaataaaaagttggcaaccctgtgtccattcctaacatttcttttgcttttgtactgatcaataaaatcttgactagagcctgggtgtcactggatagcctatgaagatcaagaattcccagaaggaagaaatggctcgctaccgacccacacatcaaggaggccttcccagcagaggtgggatctcagctgggccgagaatggctagcaattgtcaggcatattttattttactttatttttatttttttattttttgagatggagtttcacgcttgtcacccaggctgcagtgtaatggtgtgatctcagctcactgcaacctccgcctcccgggttgaagtgattctcctgcctcagcctcccaagtagctggaattacacacatgtacaccatgcccacctaattttgtatttttagtagagacggagttttaccatgatggccaggctggtcttgaactccttacctcaagtgatctgcccatctcggcctcccaaagtgctgggattacaggcgtgagccaccgcgcctggccatgaggcatattttaaaaagtaaaataccattgattttggaatgtttatactgtattagtggctccttatcagatcaaacactcggcctgtcgctttagagctttcaaactgagaaacactttcaaaggaaagactgtctcttattacttgcttgtaaatggaaaacctgttttaattacacctgaaaactactttcataagattgacttatgtactgtctgttcaaaacttacagaagcaagccccaatttttttcactgacatttgaagccttccctgaagggacccccagcacatccccaccctctgtgccatccctaccctgcaaacccctgctttaaccaggtctaatgggcactgtgcttgaatgggcttgtctcctgctggccttgggtcctcccctgcctttcagctttctcttctgccctctctttggtgggaagttcctacactgccttctccaggaagccctcactcctggatccagccagctgtggtgttggctttgcatgtcactcacctggtatttagttctatttggggggctattaatcctgcctgcctagactgccaccttcctgaggcacagatcttgtcttcccagtccctgagtgccccgtgtgtgtggcatctcaaaggcggggagctttgctcactctgaaaggagccaacacagtaggagccccagactgtggggccaggcatgtatctccctgctacctacttatctgtgctgtgacactcatggtcccactgaacttgcaacccaatgagatgtcctcctggttggctggacatttccttaaagacatgagagaagaaagagagctcattaaagtcagaggtgctctctgcttgccctgggcagtgactttgcagcgggaaaccaagaggctgatgctgatgtttagcctgtgtccaagccttgtcacgctgattctgtgcaaagaggagaagctgggagcatcttaggtgatgtccttgtgttagttacttaaggttgctgtcacaaagtaccatgaacagagtggcttaagacaacaaaaatgtatacttttgtatcctggaggccagaagtctgaaatcaaggagttggcggggccattctctagggagaatctgttccatgcctttcttttcgcttttggtgttgccaacagccttggcattccttggtttgtagatgcattaatcactcagctttgcctcggtggtcacatggcttccctctttgtgtgtgtctgttttcccttcttataaggacatcaacatattggattaggggcccacaaactccaggatgacctcatcttaactaattaaattggcagtgaccctatttccaaataaggtcacatcctgaggtctggaaaagacatgtatttggggaagggaggatgctgttcaacccagtgccagcctggattctgtaacaaactgactgggaaggagtctgcgctctcctcggctaacagagagaattctgggacctaacatctattcagcaggcacacaccaagttgatgtgggggaaaagcactggggttggagtcagaaaacttaggtataagcccagtctccaccgtagtccagtggggtaaaccttgctttccttgtctttcccatggggatgataataccctttcctccctcccagggttcaggttaagaaaatccactcacacaaaagctcttcgtagcctgcaggcagtatgcacatggtggatggtaccatgcttctttttgtccaggagatggctttgtaagttaagttcagaaatttgcaaggggtgcttggagctatttgatagataccagtccctctgctcactcccaagtacttcgtgatattctatgggccaaaacaccagccgtgcccagctccacccatcttaggtgatgaggaagagtagtttccacaagctcatgagttcaggccaattgtggtgaggagtaggagaggaggctgtgcatacaaagaccagagatttgagcagcgccttagtcagttcaggctgctgtaacaaaatactgtaaactggggtatttcctggggacttataaaccacagaaatgtatttcttatggttctggaggttgggaagtccaagatcaaggtgctggcagacttggtgtctggtgagggctcattcgtggatggctgtatttttggtgtgtcctcacatggtggaaggggtgagctagctctcctgggtctctggtataacagtcctaatttcatacatgaggccttctgccctcatgacctaatcacctcccaaaggccccacctcctaataccttgggggttaggatttcaacataggaatttgggggagggaatcacaaacattcggaccataacaagcagtgatcttaactttccacagatctgctgtgctatgtttcattccatgaactggcaggacaggtgttcttatttctaactagaatccagagacactcaatgtgttgcctgaggatctgcaattagttcatggcaaagtgacccagataccttgattcatggtccagtatattcttttaactagttcccaggactgtttacagaaaactgtagacccatccaccctcacacttgccttgagtttgctctccccacctgcccacccctgactcagtctgggaggtggtgggggggtccgagcatgtatgagacccaatgctggcacagagtatgtgctccgtaaacacttcctttcccctttcccctgtaaacccaagcaccctggtctctgttcttcagatgccgcttactggtatactccttcctggcattgtaggatctggatgtggaggtctccttcccccaggtgtataggaggcccttcctttgtgttccctgcagtcctcaacatgaagctgggcccatggagcccaatccccacaggctgatggcattgagcaccctggcctcactctgtttctcctctgttcctgagcctcccacccaggaaacacacccactgctgactccatgtcccagtaccccagccacacatggcttctctgtgggcggcttcaggcaaagcttctgtctctcctcacccgctctgcacttcctgccctgcaggcagagggagctcccttcattgacgggtggccatgggcagggtgatatgtttgagaagcagtgaatcctgtagctgaaaggaaccatggggccacttaggtcagtagttcccaggccctggtgcttttcagaagtggggaccttgttagaagtcaagatccccaggtcctccccaggatcttctgacctagcaggtctggagtgggggccaggaggctgcatttttaaccagtaccccaaaatatctgtaggtagttgtaggagaaccgaagtttgggatccactcatatactccaacgtcttcattatgtggatgagaaaaatcagactcacagaggctgtgtcacctacccaaggtcacccagcttgataatgatgaaactaaaattagaacccaagattcctggcttccaagatgatgctcttactgccacagcttgctccttgcccttgctatgtttccagagggagaaaaaacataagaggcaatatggaatccagtaatccaaatgtgctctgtgctgagaggtcggtagaacatgatagttaagacgccagcctggtaccaggcagaccttggttccaaccctgtaaaatgagaataatgatgatacccacctcccagggttgttgtgagatcatctacataaaacattaaacacaggacctggcatgcagcaagaactaggggtcaagggtttggcctgtatgagagggattcaggcccagttacttcattcccctgatgttatggcaatggaggagtcccccaagcaggtggaggtacagctgccattgcattgctctgcagtaaagagtcttcaatgtagggacctcctgggcactgtgagccctggtgttccaaaccccaagattcccattccctcacctaccacaaaattcatattcatctgggagaaccaactcaaggctcagcccaaccctgccaaggtcaccagaggataaggccgtgaatcacttttcccacaacttcccttttaagggcaggtccccagcttttattgtactctgttttatatcattataattgtgctgatcagcaaggagaacagacccatttttacaagggaaaggagacacccacaaaaaaaagccaaaattatgacagtttaaagcttgcagcaaacactttttaaattagatctgccttcagtatgggtgtcagacagtttcagagcagagcctgatttggaggagaggcgagttagcccttttagggggcatgtggtcggcaaagaggccaggagcagttattgggaatgaaagtcacttacttacaagaaaggaagtggatggagggtgacgttcttcgcattgctggtgccctggtgctcaccatgatgccaggtgggctttcaatgcctggagaggggagatgaccatcctgatcatcagcctcaaagacctacctctgactgacctggggaaagggacttgattttctggggttcagcttctttttctctgggagtctgaccctctcctcccacctgccccactctcttgctaccttggggattagtggccggggctaagggagttggagcaaggccaggcctgggagacacaggtgcaagtccagataatggtgcaatcatctgttctggatgatggatcagaaaaggcataagtgcaatcttctttttaaaaaatggagtgtgtaaataagcatcattaccacattactgatagtatttggttctgtggccttgagcaggtccttccccctctttgtgctatactgtcttcatctgaacaactaaagccctggaccagatgaacttccatatcccttccagctagaatgcttgctgtgcaccacaaagcctgttagtcttctgctgccttccaggtgaaccaccaggaaggaattggagactgaagagggcaaacaaagcagacactgaggctgtgatgaggggaagtcttcctttagagactaaccctgtgccacttaggcagcgacagtccccttccacagcaacccatgccagaggagcctcgctgctggaatgaggttcctgttccacgcgtttgacgtgtgtgctgatgactctgcaccatatggtaagggtgtccaggctgctgctggtgggtattttatttccttgcctgttggttttaaggaggctgtatagatgctgccctgtgcccatctcagcacaggaagcagagctgagcagcagagatgaaaggcatacagaggccaaggaggcatccatcctggtgtagctgatgtgcttggggccacaggtggtcctactcaggggcagtccctcttgtggggccgcagacctggagcagtcttagcctgggtaagcccaggtgcaggagagaggagggaggtttggctaagacaatagaagccctgcagtgccctggacccatgcctgctttgataaatagcccttctctgcctccattcatctatccacccatccattcatccacccattcactcacgcattcattcattcatccattcacccacccatttatccatgtacttctttgctttcttctcactcatgaatgtgaggatacctcatggcatcaagtgctgttggtcatcaaaaggaccttggaggagatgtgctctaactctctgaggctcagtccctccattgcctacagacagcccttccttcttgggaaactccaagtctggaagttctttcttgagacaagatcggcctccgtctcgttcccactgcttagtcctgccgacttccttctcctttccagagccacatggaccaagcctgatcatttcaagggacagccgttgagcccagtgtttctccaagtgtggaatgggcccttcgcatggctggggagacaatttggggcagtacatggacattttaaatagttatttttactgttacccttatcatagcaagcaataatagtggtgatttttaaaaaaagttccctttccagatttttatgtaagaaaaaagtgagttgatttaatgaaaaaatgaggaaaaacgctatgcatacatggacatggcaagggctccaatggtcccgggggatgctgcactggggagtctcacctgcgctcccttcctgcacccgctccctctgttcccctcacttcacactgttctttgattgtggatatcacataactatctgtataggttgtttgtcaagcccacctgtcaggcctgaccccccgtctgtaatccccacatacatctccacggggaggccatcacatctcttcatcatgtcatatctgaagtgagcttctcagacaccctggaattctagaaccactaggggttggggaaagggacatttcttaagtatttcctatttaatgtgttcagttcacatcttccctttagtcctaaaagagtctctgcaacaagatattctctccattttacaaccaaagaaatggagacacaggaaggttaaaccatctgtccaagctgcaatagttgtggaagagctaaaattctaaacttgatttgtctccttccagcgccgtggacgtcccactacactgggatgccttctagctgcatgcacgaaggggagtggggattatccagccaaattcacttttgtggataaagaaactgcggtctggcaagtttgcatggcatgtccaagtcccctggggtcactggccagcccacactttggactctgttttctgtgagcctttcattcttccagccgttctgaatgaagtctgaaggccacgtttgatagtccccgtcaggccgtaacattttctcactctgtcttttctcttcctcttctccctctctttgattcagactgtcattacctccttcctggaccacggcagaggtctccccacttcagtctagttcatctaaagattgcttttcatatttatttcctaaaacatagcttggcacatatcaccctttgatcgtgaaccgtcgtcagcccaagtcaacgtggatgttaggtcccagatacaacatcctgggtagggagtgtagactcttcctgcgatcctggaggctggctggagtttagacctcacctgcctgggcagaggctttcccccaccgtgcagacactccagcaaacaggggctgctgcttgtttcccctgaggatcttgtgtttctcatgtggaggtcaccgaccttgaccaggaccccattgtgcagctcctcccctgccaccttcaggcctcgctgccaccacacatcctgaccaccagccccagcaatcgccttttctccaaatccttaaactgccgattaccagcagggctcatgtggcaggttgcacacacaatctgtgttgtaatttgtccatggcatgtgtccttcctgcccacttgcctggactgtgcaccccaaaggcaggggaagcatctcctgccctttgtaactgcagtcctttgtcccagtgctctcagggtgggccctcggcacaggccgtccgtgttgaggatactaaggtgtcctggtgggtgctgctcatttgaattcacatggtccgggcagggggaagggttgcccgggaagaagggtggcctctgcagcacccctggagttgcaccccgagtgctgggagacaggcagcctgagaggtgaaagcatgttgtcaaccatgacatgctgcaggcactggagggaggccgtggctgggacatcgaccttgatggcattcagtgcccttcaacttctactctggaggactctgtgagcctctagtgcccggcactatacaatgcactgtggatagcacaggaaaatctgccctcagagtgctcctgctcctgaagcaggagcgaggtcttgcacgcttgctgaatgggacagcctggaaagcaggccgtcgtgccatgtaccaacatcccaaacgagcagtggacagactggccaggaggctgcagaaccacaggaaaaggagaccgagaggctgggcaagccaaagcaccctcccaggggaggagaagtccagctggcctggctgtgagagcttcccaggcaaggggctgcaggggcagtgatggagatgggtggtcagggaggcaacttctccaccggagcagtgagagttgggagaagacaagatatggaggtggggaaggaaggatttaagcagagaagctgggtcctgatgaactactaattgggaatccttataagttcttgagttagggaagtggcatgttcaaagtgagactctggaaagttccttgtcagaaattcactgctcagaaattccttcatcccttgaaggtaggaagaagccaccactaggcggggaaatattgggtctgcatccctgtgtcctccagctgtagatctgaggctgttgaaggggcctcttctccgcctcctcaccccggcctctctaagagctgtaacgttactgcctccctcccacagcctcatcctctgctccatagctctgtgctgtaacaagaggctaagcacagaattacatgggctacccttggctgggggtttgggctgatggctgtagatctagtctgagaccataatttgaactaagcatctcccacacaggctgggagctaacagggaggcagagcagcatttgtcttccagtgtctgcacgctactgccttttccacccaggcaggactaagttgagctttaatatgcccaaatggctgataaggggtggaagcactgggcaccgttgcagagacatcagatgagcccatcaatagagctgctttcagaagcaagtactagaaaactcaactcggaatgactttcacaataaggaaattttatctcacatacaggaagccccaaattaaggtggcactgaagttggttcaactgcttcccccaggacctcagtttttcccaccttttctctttgcccaccctcagcatgttgctcttgtcatcaattagctgtcctcatggtccccagatggctgccacagttccagacttcacatatagacatggatgtttcccattcaacgagagatcatagtgcttttgtgctggtatgcctctctgtctttctgaatcaatgagaaaatttcccttcatgccacactggcagggttgggtctcaggccacttctgaagctaatggatggagaagagaaaaggaataaagtcagctttagctgggttacaccagtggtgggttcatagccagtggtgctcctcataaggtggtgaccaggtctgacaggcagtgggaagaaagtgtgtggtaggggaagagtggggaggcctgtgcagcagccagcacatgactcaaaaatcaggcattcagtgtagccccaacaaagccccaacacacttcccattctgacaattgtgccaggtaaagggggttctgaggtggctgggaggtgagctgatggagtccagctttccctctaatcacaaacaatgggaaaaaaacattaaactcaacattctggctctaccacctactagcagtaaggctttgtggaagattatctaagccctctgatctgtttgctcatctctatattggagatagtttttacccatcatgcagagttactgttaggattagaacagaaatgtccaggctccgactgttgctaatggcagctatggtggaggtgatgatggtggagataggggaggtggaaatggtggtaatggtgatgatgggggaggtggtgttggtggtggcaatgatggtaatggtagaggtagtttggatggtggtaatggggatggtggtaatggtgatagtggagatggtagaggtggtgatggtggtggtggggatggtgatgatggtggtggtggtaatggtggtggtaatgatggtggtgatgatggtggtgatggtggtggtaatggtggtggcggtggtgatgatggtgatagtagaggtagtagagatggtagtggtggtggcagtggagtggtggtggtggtgatggttgggatggtggtgataatgatggtgatgatggtggtggtggtggtaatggtagcggtatgatggtagtggtggtgagggtggtggtggtaatgatggtggtgatgatggtagtgatggtggtaatggtggtggcagtggtgatgatagtgatagtagaggtagtagtagggatggtggtaatggtgatagtggggatggtagtggtggtggtggtggggatggtgggataatgacggcgatggtgatggtggtggtggtggtggttgtgatggtggggatggtgatgataatgatggtgatggtggtggtggtaatgatagtggtaatgatggtggtggtggtggtggtggttgtggtgatggtggggatggtgatgataatgatgatggtggtggtaatgatggtggtggtggtgatggtggtcatggtagtcatggtggtggtggtgatggcggaaggaggtgatgttggaggtggacatggcaggcagatggggattgagaagtccagagcagggtggccactgagctgcatcgtggaggagtaggagttcttggaagtggagaaagtggcagggatgggaagggcatgaagaagaaagctgccggaaacagcctgcctggtttgggtgtggtgagcctttggtgtggctggagcacagaatgtggctggggaacggggagggtcagactgtgacagaccttgaaccatgctaaggaggctagatcccatttaagggcagaagggagccattgaaggctttcgagcagtaaaactccctaggtgtcaatgagcctggttaggaagctcttttaatatccaaacaacccatgatgggggcctgagtggggagaggccatggggtgaggcagaaagacaggatcctgttccctgggccaggtgttggtctaactcctgaaagaaggtgggcagttagtagagagttttaaggccactgctgcactttttccccatttgggaaattacatgctagcccacaggtcactaagcaaatgcccattgtccccaggagtaattcagccctgattggtaatatctgtcaccctctccactccattgcccccaaagaagaggtaatcaccatgagcacagtgagctccttggagagtttggggctgtggccacgctctgacacacagctgcccaatgacagaacaagtagccttatgaggacctgacagccctgggatagaggaggtcagtggagaaggggcttctgccctgggcaggtggctggcctgggtggcatttgggcttcctctcaactccaagagggtgacacaggcagcattgtggcaaaggttgatcatgccctctgtactgttcaaacgctggacaccaggcaaatcaaatgccccatgcctgccctgtaggttgcagttggaaaaacgtgggccataaggaggccactggggtgtgcaaatctaccgcattggcttctcatccccagacctgcctgtgagaggtcagcacaggcacatgtcttggctggggcagtggaagtgaagagcccaagaggcgtgcacagggctagtgtcagacaacgaggcagctttcagcaccctggatctgagcacccacacccacgtgctggggcagggaggcaagtcaggcccacacccatgtgctggggcagggaggaaagcatactcgcaagaaactgataggcaactaagccatttcaacttaacatcctgggcaactacagagaaagagataagtttgagaagggtttttttttttttaattgagctactgtaaaagcaatgaaactagcatactttttaattcacccagcctcaattgctgcttgccctcaataaataggtgcattgttctcttcaaggctgctttgctgttaggctattagtggttttccctgtccttctgctttacaagaatgtcctgagtgtaagcccagaccgttcggagcagcaggcaccttctagcagaggctgctgcagaagacccccggcaggacctgccctcaggattgtgaaatcacagcattgccccacctccctgcccagcccttcttcccagtctaggctcaccctgcgcatctgtccgctggcccactacaaaaggctgtgctgtcaaacatttaagatccaaaagaatgcttctttttttattgtggtaaaatatatataacacaatttaccattctaaccatttttaagtgtgaaattcagtggcattaatcacacccacaatgttgtgcaaccatcaccaccatttccgaagtttttcatctccacaaacaggaactctgtacctgttaagcagtaattcccattgctccttcccccagcccctcgtaacccgtaatctactgtgtgtctctgtgaatttgcctactctagatctttcatgtaagtgggatcatacggtatttgtcctactgtgtctggcttcttttgcttagcacagtgttttcacggctcgtccatgctgtagcatgtgtgggaatgtgtaggcaccacattttgtttatccatttctgtcagtggaaggaaggcttcttcatggctgaatctcaggcataggtggagatcccaggaggaggaggccttcagtgtgggaggcctgctgcccacccctccagccatacctggcaagcaggcttttacctgcccagcagctcctgttgggcacagtaacccaggggtttcagacagtccatggatagagacggccgtgcttcagcagaaggaatgtcagaccagccatggagaaactctcatgcccctcacataggcaagacatgtgtccttgaatcagccccctcacctccatatcccaaggagtttgggatgggtgtcctggtttttctcccagcctcttacattctccaactcatcgatgcgctgagagggcaatgcggcaagtggagcaaagtgctgcaactctcaggaagtatttgtggcgtgctggatgaatacatgggagaagaatgaggtagtgagagctaagaggttgtgcatccttcatctctcagacagagaataggcaggaaatgcatgtagaggtcgggctgatgagtattcaagttctgaaacaacctgagatacagcgtgctgcttgaggtgttattattgtgttgattgtcttttgcaccttgtactgagatggaattgcataactgggcttctcatcaattctgtttggtggagaattcttgctggcttccataagtacatttacataaatctaggtgggcacacacaagctgtcttggtatgagttctcacaccctgggtctgtcacctagtggatgtagccacacagtgttcagcacaggtgggtgagcatcccccagctctactgtgcacatgggagtagacacttcagtcagtctctccagactgtcctggtcccaagagatctaccctggcatggcttctgctcacaaggagtctgtgttcctctaaagcacaaatattaataatctcattaatggagggtgttttgttataaagtctctttgtattcatggtgatcctcagaacaacaaggagaggaagtgaagaagaggagctctttattccgtcccatgtcctaaaatctcactgtgcctttggcagaaatgcacacaaaccagggcctggcggtctccctcgccatagcatcttggagggactttggaagttagctaccgctttggaagtggtattcaaagttccaagaaaaacgaaaaaaacactgatccctcttttcaaatcttatgcagaacctggcacataaagccagtaaaattcttccggactggtcagtaataggtagctgctgctgctttttgtgtgtattctctgtccacactctgtcatattggctccctggaccctcttcaactgtgttaggacccttcgacactcagcatgtgggattatggcattgctctggttcaagaggggatggggagtcaaagcctccttacttagccttcctcttgcctgcacctgtcccgaagccctctgtggaggcctagagctctttgcagcactgtaattttcttacgtccttttgcacatgagaaaatagacccagagaagtagagtgacttgtccaaggatgtgcagccagttggtgccagaatcaaaattattaccatcattcaaagacttctcatcagtaaagactcatcattattattctcattcttgagtctttgtcctcaagaagcttataatgtagttgaaaagagtggtaatatatacgtgagaagataaattggaaaactaggatagcctgtacacatcagtgtctaattagctccacaagtgtttagaagccatcatgattcctggaactggggctctctctccactgacctcttctaaatatttcagacatgagtgtggccatggaccccccagttgccagtaggagatctaagaaatgaacagggagagaaggaagaaagggagaagaagatggaaataggaagcaataaaggaaaaatggaattgaagagaaagtggtagaaaggaagaagacaggagctatctgtgggcaaggtcatcagcctgcctcaaggctggcagggatccacccactgtcagaggagcagggtcctccaggagcaccggggaatcccttccagcctgtattgggccgttgttgcagtgctataaagaactgcctgagactgggtaatgtataagaaaagaggtttaattggctcatggttctgtgggctgtacaggaagcatagtgccatctgcttctggggaggcctcaggaggcttccaatcatggcagaaggcaaagggggagcaggcacatcacatgatgagaacagagcaagagagagaatggagcagggaggtgccacacatttttaaatgatcagatcttacaggaatgcagagagctcacttatctccaaggggatgggctaagcctttcatgagggatccatcctcatcacccaaacacctccaaccctagggattacaattgaacatgagatctaggtgaagttatgctcaaacgatattctgctcttgccttctcccaaatctcatgtcctcatgttgcaaaatacaatcatcccttctccatggtccccccaaagtcttaagtcattcagcattaactcaaaagtccaaagactcatctgaagtagcagggctggagggcccggtaggagcaagatggaaggcaaatcccttccacctatgggcctgtaaaatcaaaagcaagttagttacttacaagatacaatgggaatataggcattgggtaaactttcctgttccaaaagggagaaattggtcaaaagaaaggggtcacagtccccaggcaagttcaaaacccagtagggcagtcattaaagagccagaatgatctgctatgattccgtgtcccacatccagggcacactggtgtgaggggtgggctcccaaggccttgggtatggcccatttgcagctttgaaagtctgggtgtttccatgctattggtctggggttcattctctcttctgcagttgttcgtacctcctctacactatccaaccttaacactgaacagtaggaatgggagtcttcatctgttccacttggcttccaaagcttcccgtttcccaagatcaccaaaagggccagtttgcatgctgaatatttggtgccttctcaatgagctctgtgaccacccaggatttaggagggcacacaggcctctggcttcagagttcaggcatgaagagggccacggaactgtatattcaaggaaccagaggcacgtggggcatctatgagaacagtctttgaccaactttttcttttcttcactccattcatactcgcccttagatgtttctatgacagcacaacgtatgttttgaaggaattaaccaagctgtcttgcttgtttttgttttttgttgttttttttaaagtaattctagaagggcagtcatgcctctaaggtcagagtgaataacactgcttcttgcaacatttagtcagcacacgcacacacacagtgcacacaaatgctacacagtgaccgtgtcccagacgtttcaacaataggcagctgtctttctctggattcctgttcagacccgctcttactggctctctgggcccttccagttctatctcagacccttaaacaatcaggcatgaggattgtgaaaccagccatgtctctggggataagtggtaccagtgaactgcgtttctccagtaccccggcaggtgagatgtgatgaacagacctttggcttgaaggtcagaaagtctggtttcctgtcctctgtgcatttctccctggcttgagtatcttgtcagaatcctaatttttcaggtgaggaggttaattagataacctttaagtttctttctctcccagacttcatgattttaagagaggtcctgtaacttctgctggagataaattcgcataatgtgaagggactttcttggggatgaggtttctgatgggatgcacatgctaatgggggtttgtagtggctgttccgtactgatttggagcccagcctctgcccttttctctttagtctgcacactctcctcgttcagccgtctcctgcaagatgaactctgctctgggccccacctctgtaggtctgatccccaatatctccacttcagcaagttcataactgatgtctctaccttcctccaaaacccctcttcctcttcttgaagtcccctgctgcagtgagaggcatcaccatccacacagtcacccaaattagaaacctcagggagggggcattgcacatctctgcactgcctcttccctcaacccctacgtacaaccagaaaacaaagcacatgctttctcctctcaaatccacctacatctcaccaatcccactatctctactttggctcccgcctccatgatctctgcatgggtcactcccctgcccttaaccctatcactcattctccagccagtgccagattgcagggcgtatctcaccaggtcattcccattctcctcagaatggaatccaagcatccaggcatagccacaaagttcctggtcatcttgctcctgccgggccctccagccctgctacttcaacaccctcactccagccaaatcaaatgtttgcatagcagagctgtccatacttcccatcttcttagttcactctccacctgcaatgcctgaccccctccacattccctactccctacccccagcacctaaccttcttcacctggacaactcttcatccttcgagattcagcttgaagattcttactttgggaagtccatccatagccagctgtgcttgcctccggaatgccatgccatgtcctaattgtattggaatcatctgtccatttgccctgcattgtaccagtacatccttgaggtctgtttctgagactttttcctcaagtctccagcacccaacacttacataaacatgtttgtgaatgcttgagttaatgttggattgaatgatcactgtcaggtgggacaggtccctctgggtctccacatgttctatgccaggatgcaggacaaatgttacatggcatggatcgcaggataggctttttttgggaaaatttgccaaggccaaaggtcaacaagagaagtcacatcccccaacccttccatctcaaaaagagatatgccaggtccaggatgctgctggccctgcagtaaacctgtacccaagtggagggccctcaccacaccccgcgacccatggctctctctttttatagggcaattaagcaagagaaagcagcctgtcaatgaggaaataagcagactgcttggtaccaggcagtctggactaggggtgccagctgcttataggagttgtctgggaatgccagtttcccagcatatagggccctcagagccttcaggatattgctgctctctctgccagagggaggagtggttctgtgcttgagtgctacctcttctggagggctcattatctagacaacccagagggagatacagggtcactttttgacaatgcaactagttgtgccacactgatcatgaatgactaaggggacagatgggtggatggatgggtgggtaagtgggtggatggtgggtgagtggatgagtagatggatgatcagatagaagaatgagtgagtgggtgaacgaatgaatgggtagatggatagatggatggataaatgtataggtaggtaggtggatggatggatggatggatatatgtaggtgggtgggtggatggatggatggatggatggatggatggatgggtaggtgggtggatagatggatagctgaataaatggataggtgggtggatggatggatgggtgagtgggtggatgtatagatgggtggttggatggtgggtgggtatatatatgtatgtatgtgtgtgggtgggtggatggatggatggatggatgggtggatggataggtgggtgggtggatggatgagtgggtggttggatggatagaagaatgggtgagtgggtgggtgggtgggtggactgacggatgggtgcgtcagtgggtggatggatggatggatggacaggtaggtgaatgggtagatgaatggatgagtgggtggtgcataggtgggtgaatggatggatggatgaatgggtgggtggctggctggataggtggtgagtgggtgggtaggtggatagatgaatggatgggtgatgggtagaaagatagatgaatggatgggtgaatgggtggatagatggattgatgggtggatggacaggtgggtgaatggatggatgaatggatgagtagtgagtgggtgggtgggtgaatggatgaatggatgggtgagtgcatgaaaagatggatgaatagatgggtgaatgggtacatggatggatgaatggatgaattggtgggtgggtggatggatggatgggtgggcaggtgatggtgaatggaagtgtgaaagcaactagcacatatgaaagcacctgacacctaatggatacccaacttgtgtgtttccctttcctgtgctttctttcccatctcagcttcacctttctgggaatatagaaagaggtgaccctgtcatctagtggcagacatgaaagctctgaaccatcatgggttggggataaggagatgggctaaggggctgtgtgacagctccactattcccactcccacaaacatcctcaggttcccctgtgctgtgttgtctcatgttttcttcttcaacattgccctgatgtacattttaacccaacatcacctgactttaaaagattggagcttcccacgtcctgtgatttgtttgtggttcacaaccccaaggcagctgcctccctaaaccaattttatggcacaaaaatgggcaggaagggaaggacgaatctgcctctgagatgctgatgaaatctgacccctgcactcctttcccacgccgcggcgtgatctgggccttcatccacacgtgagctggtggttcttccgggtacctcagaaacacctggaaattgtctacgatgcacatttccaagcttcatagccagatgatctgtttcagtaggtctgggtagggcccagaattctacagtttttaattttgcatcctcaaactgcttcacagtgaggctggcactccctacatgcccaggggattgtgatggaatgaatgggagcccagggtactgatatggcctgatggctccctgcagagcttcccatctggccctgctcccgatggccctgccttggaggaaccttccagctggctaggcaggaggaggtgggcctttgtgggcaacatccctcctccagaatgtgggtgagcctggaacaccccctcaccactgctcccacatgcacacaccagagctccctctgactcgcagaggaggggaaaatgggtctaggggttctgagccgagtgcccacttggggctgtggacaggcccgccgcactctggagggcctatgcccgaatgcaatgtggatgggtgtttcgtggctccagtgagggatggctgaggcttctgcagaggcgagcagtggagcatgaaggcatccaggcagcctttgcctggtgggggccattaaggctctgcacttgggatgggggtgtgggagaaagcaattagtggcgagggacgtgcatgaatcagcacagagtcggctggctctaattgagccaacaagtttgtcctgttcgctctgggctcccagggatgggagctgcatccttaaatgcaaagcccttcttcaaggtggcaggggaggaagaagattgtcttctgccccttgaggaaagagaggggctctttccattctccactcccacccagtgcctgcctccatccgcaaagtgctgattttctctgctgaaatgttcgacgtctttggacagaaggttttattttctcaagaaagagatttcacatttctggatcggtgtatgtgagcaggttgcctctgtctgggctgctcttaagggatcttcaccgtctccatttctttgtggctgcatttttgctctgtcttttggaggaactcggctagtaccctccccaagaccaagtctgctgtcttcagggcttgttcctgcagaatcggagcgcggttttccaggagctgtgctttatccccttctcttttggccctgacattgtttccctttagatggagacactatgaattctcttctgggagagcacaataaaatgtcaactgattaactaaataaaatgtttcaaaaaatatgaaatttttccactagtctaatatttacatgttcatgggggaactttgatgcagaaaaaaaaaaatcctgtaatccccagtagcttggtgctgtcgcggtagagcaggtcgtggagttgctaatttggcctgggtgtccccacttggttccaccacagagggggcagcattatcttccacctacttgtgagatctactggttccaaactttccaaatccccaaaccaatgacttatttttctctcttttctatttctgtttcctaggaacgagtggaatatctctttctcataatttttacggtggaagcgtttttaaaagtaatcgcctatggactcctctttcaccccaatgcctacctccgcaacggctggaacctactagattttataattgtggttgtggggtaagtatcactgtctgtttctttccctttatcttaccagtgttgcgggacttttccttaagtcagctgaagacagggtcgttgtcagacggccacaaagatttaggctcgcagatgatctagagtgagaaaaatgagatttattttgctaaaaggaacagaaagggaaagagagactcagcaaagtgagagagtgcgcttcctgcccatgggcttcccgcctcgcaggttgaatccaaggttctacccaggaaaaggaggggtcaggcttctccctgctgcagttggtggcgtgaacttccgtggttccaccctagtgtgcactcctcccagtgcgcaggctggctggagtttctctggggacccctccccacctggctgtctcaccagtacatccctcttcttccttctgtgttatctcttttcaatttggtcctaactatgctgggcttcaggcaagaagaaaggatctgtgaaaatcactttgaattcagacttccccagagggacaggggctatgacccaagagcacccctctccaccactcccacacagcatgcacacacggttggacctgagtgctcctgatggaacccaggctgctctgtgctgctgtaggatatccccctgcttaaggactttcgtttcatctcagaccacatctggccccgcagttcctctgatagtttccctgctgtatcactgagcacatttggggcagctcgtccgtgagcatgcagtctgcaggtgtggggtgagggtggggcgcacacaggctgtgcctgtgctctggacttgtacagaggcctcttccccattctcactctacagggggcctggttctgtggccccagaaaaccagactgctcaagacaggtggatgagaaggaaacagggaactatgaaaggcgaagatgacaggtaaccaaaccccaatcaaatgcagcttcccccagacaccctgctccactgtagcataagataaggtagagtcagtctaggctttcaaaacagcaatgcaaagaatcttaaataaaatgtagaagagatctccttataaataagttattaacctcacaaaaagaatctccataaaatatttgtacctaacaggcctacctacactggtgaagtgtaagttattaaaatgcaggtgaggtcaggcgcggtggctcacacctgtaatcccagcactttgggaggccaaggcgggcggatcacgaggtcaggagatcgagaccatcctggctaacacggtgaaaccccgtctctactaaaaatacaaaaacttagccgggcgaggtggcgggcgcctgtagtcccagctactcgggaggctgaggcaggagaatggcgtgaacccgggaggcggagcttacagtgagccgagatcatgccactgcactccagcctgggcaacagagcgagactccatctcaaaaaaaaaaaaaaaaaaaaaaaaacgcaggtgatgaagttccatcaacacatctgtcttgtaataggagggagcccattgcagcagattttaccttgagaagaagccggttcctttgggctaatcccttgttactctgagcccagtgagtgctcaagtggctgccaccttggactctccctctcttgaagtcctggcagtctgcagagtcaaggtcagaatgtcaggagctctttatcccagaggcctatttttggaggatccttttgtgccatcccggaggagacacagccattgtggacgtctccagagcacccgccgttcaccatcttgtgagagtgcctggtctttactgcaggaaatgacgcaggaggacgtcgagatcatttgcaagttatttccttgtctctggccatctggatggctcataaggttgcttggaaccacgttagggtttttgttgttgttgttgttgccttattttgcctggccaatgaatgacgcactttggccacatgaacctcaggaatatttgggtgatacgaggtgcactaaggttattagcatcattagccaggtctagctctggctcatagcactcggggtgtgcatgcagctataggagagattttgctgcttctgctcatgccagaataaacaaagagtggctaaacgcatgccttgaatgactcagtaaaccatagcaaaagtccttaaggtgggttgttccaaatgcccctaaatcctttttagaatttggcatctttctcaaggcctcagtctcctgggagtcttttgcacatgcatagaaaagagccttgggaatgatgagagcagatgcttctgggaccagtggagggatgagggtgacttgcagggacgaattttgtttaggcaaaattttggaattttgaagtgagttggagttgattatatgtgctttgccccatatgtggtcttaatgaaatcatgagtcgggggagcagagacaagaaatacagggtgagtaggcaccgaacaggagccctgggagggaggggccctgcctgggttgacagggaggcagtgcagtggtgcatctctggcccacacctggtgcctcacctgcggtctgtctggacccgcttcatcccttagactcctccacacaaccacaaggggccaggctttttctggggtcagcccagattccagtcacatctccctagggcctaggccatgaggctggtgaagagagggaggcatccagttgtgtgctcctgtttctaagccacagaggttaagatgccagcagttgcccagctcgtggttggtcttgcactgggacatatttggcacctagtctctcttctcctaagggctcttcatcctgtctaaatcagcccattcttgtaacaatcccccatcgctgcagggtgcagcttaccacctctcttcagctcatctcctttttctgcttcctttgcaatattaaatgggtagccctttgcttccctgtgtctcttggaaaatatctgctatccttggcccctcttctgtagctgtaggggaaggtttctcctggcctcccacaaagctgggggagcctaactcaccctagagaaaggtggacctgcctgcctactgcctgagtgccaggctgagagcctcatctctgcattgctattctggtggcacaagacacgtggcatttctttccttcctaaagcagaggcctcttggtggtgggattgctgaataaacacagagggactgtggcggcctcagatccacgtgcccctaccgagggaccgtggaatcctcagtggatcctcaggaggttccacgccagccagtgaggctttgttgcatccctacctccctagcagggtggaggccctgcctttcccattctctgggcctcacgatcattccacagcctcacggtccttttcttctaaaagctccactgccggactacagatctgccagacacagctcccagagcagtccttcggccaggcgtccacaccagagcccaaccctcagggaccagtgggcaccaagcagtggttttgcctttagaatgtctcattgaggagaaatacaccagccactcctacacccatgtttgaattttctaccctttcagaattaaaagcggatacttaataaagagtctcaacttgaggcaggagttaaaggcaagttgtctaatctccactcccttcaccgaatagtattttgtgaacctcttttactccgatcagcatattactttcctgcaggaaatactgggaacaaaatctggtttgcatttggaatgttgtttgacaaatttgcaaactggtctccatttcctcaggtttcagtgatctaggcttcagtggaaagaacatttcccttgtggagaaagaagcccactcccccatcctggcaacttctgcctgggattcaaggcctcaccagctaacataggaagccatcaagttgccaggctgagagacactgcagatacggcctggacagggttctcaaacttcgttcggctgcagaacccactgttgagagtctcgctcagaggtccaagacacagaccagatagaagggaagctcctctggactagaggagccagaacgccagtcacgcagccagtctgtgcctgggggcctccatggagcgtttctagaccaatcccctcatcgctcagccctgcctggccctgaacttctgctaatgcatctggctaatcccccagctgcagcttcccatttctagatccagatacctggggcataagtcacttaagagctcaagcctattgctcctgaatgaaagctgtcctggttcatagtttagatctgatatggagacccactcctaatacctgggctccctccttgatcccacgcccctctgttgaagaaacacgacccagcgtgtagtgcactctgtggcaatgaatctgtagcatcctctctgggtataaaggacagaaatcaccctgcacgcccttttccctatttttcttggttgccacgaaaagcccaaaattattgagtcatccctcatcacccggactcctgttcccatggggctttgtgcatcctctgatctaatccctcctttctcaccaccccgctgcagaaaccttcccactgtgccctcccatccccatagtccctcgcctgttcagggtcagccaacttttctgtaagggccggatgctggttttcatctttgcaagccatgcagtctctgttccagctactccaccctgcccagcagcaggacaagagtggcatctccatgagtgggtgtaactgaattccaacaaaactttgcaaaacaggtggcccagttctcagcttcctttctggtcacttcctgattctccctgagggtgcagctttctctgctgtctctcagcaggcagccacttcctctcccagaagcctccttccactgcaccaggttgccaggtctaagggggccctgccagctcctgatttctgctccactgcacccccacctccctggagccctccagttttgacatttgtgtcatcagatcctctatgccttacttctctttactgcagccttctgcagacctttgagtcacccctccttgtgccttgaggacaagggctcttggttcgctctacttcactccgacactcacttctccaccttcctgcagtagcttcttggttcttggatatctggcttctggggaacctatctcagtagtcccaatcccatggctatagccaatatccctgtcaccactgattaacacctcccccataatcccaaatctaacatcctaccctctaaccagcaccaccgtctttccggtcccctccctctctcaccctgactcccacgatcccttcgtcccaccgcactcttcatccctgccaccatgtccaccctccttccagccagctcagacgccatgtgccactgctgccctcactcacttgcatttatgctcagcattcttagtcttctgtctgtttatcttgcacacctggaaaaacaccaaccctaatcaagtccaaccagagatctgcttggtacctggaaagggtcaagaaatctgcaaagttgagcagactctcactttacactcatgacctccaacctcaaggaggccctcggtgacacctgagggccctcctgctttgtccgcactccattcacccttctgctttctgagctaattctttcagcacccgtgcctctctcgtcacacttcccgtctccttcccctttcacgttttcagctgatggcctcgttccccagttcccttagaaagatgcaatcagaagaaactttcatgtattcccacaaccacgcgtctatgctgacaatgcgccttctcactgaaccacgacccacggcgctgcccctgcacaggtggacgcccttcgcatgcacccatccccttcttgccagtgaaggagctccgtcccacacggccctgcccctgcacgggtggcaccctttctgtgcacccatccccttcttgccagtgaaggagctccgtccttccagcaatggttccctctcgcttctatgtcatcacattttctgcctctgttagatgattcccatcacatagaaaactgctgtcatatctcccattcagaaacaaaaccctcttgactccacgcccacttctagtaaccccctttttttctctgctcatttagagcaaaatttcccaaaagacttgtctatacggtagccacacgtggccattcagcacttgaaatgtggctaatctgcattgcaataataataattataagtataaaacatacagcatatttcaaagatttagtacaaaacaaggaatgacaaatgtctcatgaatgattttttatatttattacatgttgagatgataatattttggctatgtcgggtgaaataaaatctatgatcactgttaatttcacctgtttttactttttaatgtggctcctagcaaaggtaaattacacatgcagcccacacttgtggcttgcatcagatttctgttggccagggctgtctatcctcacggcctcccactcctcccatgctctcttgaacctatgtctgctgggtgtttgtccacatcactccaccaacacagatgccttcaaggtctggatggtcttggtgttgctaaacccagcggtcggtgtccagccatgtctctgcagcacgtgacaccaccgcctgttcactgaccgctctcttcatggggcgccgttctctccatgtccctgctctgcaagccatccctcatcagtctgttttgttgctttctcctctcttgacccctcaatgtgggagcactgcagggttgagtgctttcacatcctcaccttctgcactggcctcctaggtagtcacatacaatttgactttaaatatgaactatacaactgctgcgcttttgtctccagcttggacctccccactgacctccagacacagtagaaccaactcaagacatgcattcgatgtccaagcaacaactcaaacttcaagaagttctcagcagaacgcttaatgtccattccgccatatctcatcattcctgttgctcatgcccaaactgttggaatcttctctgattcccctctctttctcacacctcacatctagtccatcagccagtcccactaactttatcttaaggtaaatctggtatctaacttttcctcactacctctaacaccaccacttgttctgagccacccagtgtctcgcgcctggatgactgccgcagctggtctctggcctcgcccccgacaggggagtctcccacaacagcagaatgattcttttagacctgtagttagatcatgtcactctcctgctcaaagtcccccaatggcttctgtctcagagaggataccagcacccggtggggttccctatttcctctccgacttcctctcccacagttctcccctttccctgccctgctccagccacactggtcgctgctgttcctctaacgcacaccctgcccctcccttgggcccctggcttacctgcttcctctgcctggaacagtctccagatagtgaagtgggtcccgccctcacttcccataggcctctgctcaagtgtcacctgcagggagttctttgtgcagatttctcaggtgggaaggaaggcggccctcaccctgtctctgcagagcccctccccgctcctcctcctcagcactcatcactctaagctgcagtgtctgtttactgattgctcagtttattgtctgtctccctgctagaatgcaagttccatgaggggaagggctttgtccattttgctatagccccagtgtctggaacagtgcccggcacaccgcaggtgttcttgtttgttggaggagtgaatatgccagctcagacctaaagtggcagggctgaaagccctgtgtctcagttacgtgcacgtgtggttctaccccacttgagaccttcttgtttaaccactcaaccattcattcatttgcgcagcacgcacctcctgagcagccaccaaggccagcacaaaggagatttccatgggccaggaacaagtcaaagagggggggtatctagaaggaaggaggtggggaaacagagcacatggttgctggcacacctgggaggggcgctaggataccatggagaagccggagggctcctcaaggagataaggactggcaacagacttcacctgcttcccacgtttgtccagcgcttgtccagctcctgcctttatgacggcagagggcctgcccctcagctcgctcaggcctccctgggccatggtggcaccctgggcatggccaccacccacactgaggggatgtcagcttacaaccacccacagactccacgcacacccacaacgcccgcccctgggctggagacgcctgcgcaatctgcttttccgggctgtatccagaggtcagagccccagctgggcaaaagaaaacccagtcctgacagtccttctctctttcctctcttctaggctttttagtgcaattttagaacaagcaaccaaagcagatggggcaaacgctctcggagggaaaggggccggatttgatgtgaaggcgctgagggccttccgcgtgctgcgccccctgcggctggtgtccggagtcccaagtaagtgaagcccgttcttgtgtacagtgttatctcctcaccaccttctgctgtcctttgctgaattgccaagaacactctgcaaagggacctgattccatataaatggaggggtttttgtttttgttttaaaatgagttcctttgatctgaagagcccaactcggatgtaagtgccttaaaacacactgtggtcccagcgcctggaaactcctggagaaagttcacagcagtcactcagccacatgaatcctacataaaggaagtggccatctgagccaccctggaggccctgggatggggatttaaatacattttgtagcagaagagccaggtggctaatctccgaggctccagagcactttagccaatgagattatctctactttctgtgtttttccaaagaacaatcaggaaagcatcagtggatgttctaaaagttctgttttgacctttctcccagccctctcctcccttcctgtcaaatggggcagcccaggcctcaggagccctactggaaataccacgcctgtcattgtgagaacttatttttcccaaagagaggaggatattccgctctctgaatcaggggaagggtttggagaggtattgcctatccggatgtcagtcacatggacaatgcctcttctgccacttctccagaagcctggcccattatgggtgcaccccaggtactgaacacagtggcttcaggccccctgggaaggcgcaagcaaaccccagcccaaggtgctcctgggagctcagtccactttagaactcctttctactcttccctcttcagtttgtggtatctgagaacaattctggactcatttgcttaaattttgctttcagttcagctccagtagatttggcccatgactcaagacataggagacccctcagactaggctaggaccagatgagtttggagatggtgtaagggacaggaagacagaggacctccgaatgcacagcctctcctacccatggcatgcactgagcacttggttaccggtgtgctgctgggtggtatcatctggagtcatgaaaccgtggaaatgtgagggactttatattaaccagtttactttttgttcatgcacggaatagtgaaaagatcttcctgtgactttaattaactagcaatagagccaagactagaatcatgtctcctgatttctagaccagctctttcctgccatacagcactgcctcttttaaagaattaagtggtatatctctcttgattgtcttggattctttttctttcttttttttttttttttttttgagacagagtcacactctgtccccaggctggagtacagtggcacaatctcagctcactgcaacctccgcctcccaggttcaagcgattctcctgcctcagcctcctgagtacctgggactacaggtgcttgccaccatgcccagctaatttttgtttttttgtgtgtgtttttttttttttttttttgtatttttagtagagacggtgtttcaccatgttagctaggatggtttcaatctcctgacctcatgatctgcctgccttggcctcccaaagtgctgagattaccggcatgagccactgcgcccggccaattgtcttggatttttacacatatatcctgtctcttaaactacactataagccccttgaaacccagaactgtgccttctattgcctctgattcccacacaacataagcaaagggaacttactgaataagcaaaagaaagagtttgttttctttgcagtgggactccctgggcaaagcttgtggcctgtcttaggctcaaaaggcacgcagagctgagcacacaagcacaattaaagcagactttctctactcggccttaactgtctgggggtacttaggtatagaaactgcatatatcgtggccaggacccacttctttttgaagcctaaattatttgggttttcctggtcaatcagccagaactcaatagccaaaatcaggaagtaggaagggaggatgacagtgactttgaacatgactttaaggagcttgtaatggtaccgccagtgtgtcagtgatagcaactgggagttaattccagatgccagccaaccaagcgaaatggacacaatgaccccgacctgttatctatgtatttattaggggcctgcaatttttattaggggtattaggacgtatcataaagaacaagcatggtcctttcactagagaaatttgacagtctaagaaaagagtataacagtcagcttttgctgtggaaataaaccatctcaaactctgcatggcttacaaccagcaacatttacacctggctcatggcacctgagggtggtggtcagctgcagctcttctgcactcagctggactctgggcttgaccacattctgcgtgccatccaattctggagcccaggtcgaaggagccctcaccttcggtggtaggccttgtggttgtcatggctgggggaggtgctcacaaaatggggcttagagccaaaccgcactagcaacttaaggcttatgcttagatgtggcttctgtcttagctgttcacattccactggccaaagcgagtcacatggccaccctcaaagataatggggccaagaagtgtgctgtacctgcagagaagcatgggtgaacgattgagaacacatagcagcctaccacaaagagactgaggagatgattgttatcaacagctgtagctacagtaattgctctagtacagagattcttaattagagatgaatatggttgagagccactcatgctacagtgcattaaaaggaagaattagattagatcgggtcacttggtttccactacagaggaaatttcccgaggacggagccctgtctccatctgcacttaagtaaggtagacgtgtcttgtagtggtcaggaagcagtaacactcctaggaattctctcaagaggatgcaggcctcaaatgcaaggccctcatgttacctgccgtgcagtccaggaaaatattttcgccattagagatgatgacactgagatggatttgctgttgtgggtgccttgtaggtagctccatgcttatgcataggagcagcaacggtgtctggtttcctttgggtcaccagtaaaatggtggctcttcctcagctcatccagccttctgccctttcttgctggaatagtgtctgtgcagcttttgaaacagggaaccatgcagaccatggtggatcagtgcactgtaccagtgtggttggtgtcatctacaaagatgtcagcagtatctcccctgactacaaacctagacaaatgcctccgtcttctacttctcatagccataggttatctctttctgtatttcagcaaaactcctcaagagttgcctctacctgttgtctgtgattcttgtcctcccattctctcttgaatccactctgatggggctttcttccccactgctgcaccaaaacatctcctgtccagaccatcagtgatcaccgttaccgcacccagtgctctgtcctccagggccatgttacatgatctgttggcagctttggatacagctgatcgctccttgtctttgaaccaccgttgcccttggcccttggcacactgctctttcttagctctgcccttcattcacttgtttcttcttcttggaatcctttgctgacttctgtctcatcttctcaccctcttaacattgggaagctccaggggtagatcctgagacctctcctctgtctgtactcactccctagttatcacgtccagcctcctggtgttaaatataatctatgtatcttccagtaaccagcagctgtgtgtcaccagcccagaccttttttccaaacctcagacttgtatccctacctgccgactccgttcctctcctgtctgaatagataataagtatcttgcacttagcaagactcatggcagaactcacagtcttcccagagtctttctcagcttggtaaatgctagcctcatccttctagcttctcaggccttattggacttatttctttttctcactctttgattacaatccatcagaaaatcctatgagctttaccttccaaacatgtcaagaatttgtctcttaccacctgcacactcagctcagcgctggccgccctcgcctccgtcctggatgatggcgacagcctcctgcaggagtctctgcctcaacccctatcatggcccggacctaacacggcattcaaacggccctctgaacagccaagtcggatcatgttcctgccctgctcaggaccctccacggcttccctgacttgcccagagtgagcgccaaagtcccataggccctgcgatctcacgcctccttcctccctaagctcacccccttcaccctcccctcctctccctcctcaccagccctccacagtgactcccttgctattcctccaacattccaagctcaccccactgtggggtggtggccggcacttgctccttctgtctgaacgccctcggctcagctctctgcacaggcctgcgcacctccttggcccccacctcggctcagctctccatacaggcctgcacacttcctcggcaccccctcggctcagctctcatacaggcctgcgcacctcctcggcccgccccttggctcagctctctgcacaggcctgcgtacctcctcggcccccgctgatgccatcccctcactccccgttcatccacccttccctgctccatttccccacatcacctctcaccatctgccattctgtatgtgtatgtgttcatttgcttatcaccccttacctcatgagaatgtaacctacgtgaggctaacaatttttgttagttgtgttcacagctgtgtcctcagcaccgacaataaaggtgataaatatctgtagaatgagcaaacatggttacacggacgcccatggcggctggcatagcttcacatcacaggccctaagagccaccccacccactaaaatgatgtgagtggtgccagcttcctggacatgtgcctttgctggcttttccaaagggtctttacttcttctgtctcatttgatcttcatgacaattgggtgatattaagaaatgtacataggcaatatatagatatgtagggtttttcttacaacaaataggttcattgggccatttttgacatctgcaattctagaccaatagtgttagaggccccaaaagttgcattttttttttttttttttttgagacggagtcttgctctgtcgcccaggctggagtgcagtggtgtgatctcggctcactgtaagctccgcctcctgggttcacgccattctcctgcttcagcctcccgagtagctgggactataggcacccgccaccacgcccggctaatttttgtatttttagtagagacgggtttcaccggttagccaggatggtctcgatctcctgacctcgtgatctgcccgcctcagcctcccaaagtgctgggattacaggcgtgagccaccgcacccggcctaaaagttgcattttttaaatgcacatatatgtactaaatgtcattgaaatcttatgatcacaggttatggaaatagatgattgcgagggtacaagtccatgagtcatttatcaatttgttcaacaaaatcgactgagtacttactttatgtaagattttgttagccattatagcagatacagaagtgagtcagatgctaagtgtgttctagagagcttgaagtgtagtagaagaaaaaatattcataaaaatgattatataaataaaaattggagctgtcaaaaaggaaagtttaggtaagatgtgcaatgtgatgaattctgtgacaagccatgcattggggacaccatactttggggagtggtgatagagaatcaggagagccttcttggagaaggtagcatttgggatggaacttgaaggatgagtgaggagaggcattccaggaaatcacacaaaggaaggagagtggccgtggccctggagatgcacactgtgaggctgcaaggctaacggcttgattacactgcagaggtgaaaatcagattggctcttccaatggggttctgtgtagttgaaagatttggccatttggcttcatagagactcttctacagtaacagaatcagttctctctgctgtgagcatccactctcccactgcagccgtgctgtggagcatgcgtattacaccaaagactaagccatatggaggaatcaacgttatacagccagatgaaccatagggagagttgtggttaaatatttgcaatgtatatgcaaggagtacatttgcttgtgaagcagtaagcaaggggtcgtttcctgctttccatttcatctcatatgccttctggagaagaactttcaggagggacttgataaagggagaagtcaaatggagatgagaaagatgtgtagggtctttgacgaaaactcagagcaacctagacttgatctgatgatgaaaggaactgaaaaatcacctttctgtaagaccagcactagccttggaagacactcatcatgaatgtttattgagcactctctgtgagccaagcacaaagctaggtgcggggacagaggtagatagtgcactcccatcagtcaaatcagaacacctgtccagttttcataaggaccatccggttttagatctggacctcccagtccagacttgataagagaacatctttctagagcagatagtcaaaatcatgtaacttagtccctgaaactgacatattttggagttcagagaatatctccgaatcagagcagaggctcaagcccacactgcttcactctttatcctttgctttttccactgcctgtgtcctcatcgtcccagacttccctttaatcctggttaatgtgattttgatttagtcctaatggaatgctttaaggacttttcgtgggatacgtttttcctagtatgtgagtctttacaagattagatctttcaggatgtcccttttgtcagtaaaatgttatatctggaagcacacagaatagaaaacagctcgctattaaacggaagtttactttcatcctgagaggtgagaaggagcactgaggaccatgtgtggatagaggtcagaagcttcaatttttccttgctcaggtgaggactgtttcctgaaagcaaatcagcaccagttagtagacaaatatctgtggagtggataccatatagaaggcaaggaaagccttacaacatgctggttttgaacatgagttcttgaatcagactacttactggcttctgccacttactgactctgtacccttagggaagttgctaagcctctctgtgccttagtttcctcctatgtaaaatgggaattgtaatcgaacgtattacatatgctgttggaaagactaaatgagttaaggcacgcaaagcactttaatggtgtcctgcttatagtaagtgctcagttaagtggtagctgttacattatattatattacatatgtagactgaaatagaggacaagatcattctcaagagacaacaaatatactttaaaagataaggaatattcaagagttaaatagcagtttgagaccaaaaatcaccagagaggcatgtgtatgattatttgacttgcatagtgtagatgatgaaatggattcaaggggagagtttaccagggactgtggcagtctgaaaagttttatgaaggaggacataccggagataagccctgaggtttatgtggaacaggcagggatggggatggaaggacatctgagggtgaaaaccttgtttgtttaggtcaccaatgtgggccagtctcggccagcacataggtgtggggtgcccaaacccattaccgaaaaggaagtatgggtcgtgagagccaggagacaaaagtccgcagtgagcagactgagctgggtcttggatggcacaccaagaggcagttttctaaacagccactgctgttcactctccatacaaaacgttcaaaaaaaccgcactgcagagacagctaagtgtcttggaaatctacaaaagaaggtcagaactgaccatgaatcttgaattccagggaggttcacgaacccacccgggctggtggcagagctgaggtcagagccataccgaagctgtcaccgctctctcccaccctgcatgacctccatcccagaggccaggtctgggccatcctgctctgtcctgagcgccctgccagaagatcctatgctgcttgacaccaaacactcttttttaaaacattcttactgatacgatgaatattgacttaaaaattgctgctgcagaagttgaaaactcacctgagtgccaagtccccaggtgaaccacacgcatcccgagatgtagttttcctcccaggatgggttctcccctcctggggattagtcaccgtgaaactggccacactgattagcaagcggtgccagttaatcagacccactgagggcacattagggctgctaaaagcggcttttctgagtgttttcacactttgatggtttaaagccactcatgctgtcctgtctgaaatttgctgttggtaaattgagccacagcagatttgcaatcccatcgtggctcccaggaaagtgttttctggcccagttggtgccgcattgtgcaagagaggaggctaggcagcaggcatggtccctgcaaacagctcctgaacctcgcttgcagttaaggacacctcccagtctggactgataagagaacatctttctggagcagatattcaaaatcctgtaactcagcccctgaaactgacatatcttggagtcccagagaagatcccagagtcagggaagaggctcaaaccacagtgcttcactccccatcccttgctttttccactgcctgtgtcctcatgttcccagacttcctttaattctggttgatgtgatttaacactgaagtacccacaggatgctgctggtgcagctgagcacaagcctgggtaggcagaggacccagcctccagccctgcattcacccggacaagcctggagaccttgggcaggtctgccctccctctggactttgtcctgcatctggggcttgaagggcctggactggctggcctctgcatccccttccctctcccacatgctcatccccaccgcaccaggctgtaccctcactgcttgcagaccttcagcctctccacccctgttctcaccccctctcatgtccttggacttggccctcattctcccctcactttctattttgcttcctcttgctttttatcccctttgtcttataggggtcttacaggccacatacccttaaacaacatgaggggacacttacaaagctacttatgaggacaggggcatgtgcagggggccacccctgaggccgtccctcattctccttcacacagcgctggaggctgcctggtccccctgcccgcccatcggagatggtccctacaacatcttctaagccctttccctcccacttctttcactgccacaggaagtactcaaaccttgtccgctgtatgtgtctcatggcactgttcctgaatccgaatgtctgggtgggaggggactaggctagtacaactgagcttccattctgcagagaggagccctgaggccagagggccacatggcttccttaaggtcacagagtgacctggtggcaggtgggcaggacccttgcttcctgcacggtctgcaaggggactctgatggcaatggtgagggaaccctcagggctgctgatctttgctgcccccaggtctcccagcctccccagaagggaggaagccccaggacccgctccccgccttcccacccaggcagcctggggttgtgctctgcagatggggcagagcaccctggagggcagccagagacagcagggggtggcggggggcccttcacactgcaggaggcttgcctctaagaaacagaatttagaacagggtgggtcccacgcccagccccgccctgccccttagcacctgccaggcccaccctctcccccggtgtctcctgatctcccagtgtggacggtctttccccttgactgctgcatccccagttaagcaactctcttcccggcatcctcccaggtgcccctgaaagacgcctgggccagcagctcaaggcccactcagagtcccgaccctgctgcgacttctctgttgccctgccaggtgctttgcctcggtttctcaatctacaaagagtgagtgatgggggtgccatggataaggaggagattctacctgtgcagccctgtgagctcccagcatccgagacctcttggagagggaccctgtgggttggcaggagccaccgcaccagataggaagggaagaggcccgccatgcggcaaagtgagctgatggacacagtaagcacactcacaggttcccgcctctgctatagtggagtttcactgagaggttactgagtatcaacaacagtatgtggctgaactgggaacatctctattatttagtgttctagatacagcaggtaaaaagtcctcatggcaaagaatgcctgcagtcacacaggaacgtcacatgtgtgctaaggcacacacacattcctccagtcacgaactggtctctttttgatttgagaacaaaatgtaggaggcagtgataaatgttagggttacctccaactacaagcaatattcagcatccgttcaaggccttcagactcaaagagcttgattagctgatgaatcggcccagtggtctagaaacacagggacgttatccctaatttagagataggcaaatccaggctatctagttcagactgttttccagtcgggataactccctccaggacttggtttctgttgtttggaagagaacacagcttcctgagccgaggggaatcacattgcttctgggctgtagggcgccctgcctggctctagagattgagagtagttcatagtttgcctgttgccttatttatgtttcaagagttgtgagccccttgggtggcaggacctgatggcaaatagtattgttgtcacctcaggaattgtgatggggtgggaggcactccggcctgccggtgaggagaccagggatctaagtctggccagctgtgtgaccttgtcatttaacctctgaccctcagcctcctcacctgcaaaatgggagggtacaactgtattcgccctagagtattagcctttagatgcctgccgtgctcacctttcaccatggcagttgccctctgaatcatgcgtaattttcagtcagctgacttcttgagcaccctcttgcatgttagttagtttagttttgttttgttttgttttttaatatttggcttgggaacgtttcagagccaccaaggttgttgccatttctgttgggggtaccccagtagactatgtggtgtatgaccccaaggatatacagaatcacatcgggaggggaaaaacttgttggtatatatatacatatatacaaacattagccaggagaaatggttctgtgcctctcacaaaaagctcacaaaacactgtggtctgtggcagcagcagatgatattgatgatgatagaaaagttctgtcttcactcagacatgccattgatcaagagcatttattcagagactactatctgccaggcatcgagccacgcgacacgagccaccagtccgtttcttcatctatgccgcattgtgttgatactggcaaaggactgaaataggaaatacactcatgtcataggaggtgtcaagctgtttgtcagggcagagaagaggagagtaacgtggcacaagttgtagacatcttccttctgaagacatgggtgattggaacagcatgtcatcaggtgagttttcagtgttgcttccagttctaagctgggataattctgagtattcttaaaatgtactgctgttggaggataatggaaaagcgctgaactcagaaaaagccttgggactgtgagcaccatcaactgcattgaggagacatccaaaagtataatgccttcttcaggctgtttttactagaccatatagtcctactaataaatacttgtgcaaaacagaaatacttttaaaaaaataatatatttattcacttaattttcccagaaataatgccttgatcatatgttttccccagaaattgttagacttaccttctatggtcaacaagagctttcctgaatttcttgagatttagtgaaagcaggtagatgtaaactatattaattacattgcattttccagaaataaaaaaaagcttgaatacccctgaaattcctctgagtattatcatcctgtgctttgttgatagagaatagcagtgacctaataatttcttttttaaccactaattctagacctgaggtgtcatgacagagtatgaccctgggcaaatgccactctttcagctcccaatatagtaagcaatcacacagcccagaggtgggagagtaggtcctaaaataagagcaggtatttattaagcactcatcttgagcccaggactgtggcaggtggtataatcatcacaagagacaagagggcttcttaaactcaggaagctccataatggattcctttttgtgtctggagacctccaaacatgaaatcacagacaaggtgatgactgattaaaaataatggcaataataaaggccacttaggcttataagtgacccaggctttctaaatgttggaaagaaaaatgaggggggaatgaaatgaagatccagtgaggccagcgtcctgtgaagtgatcaatacgcagaacgtgagccccatgtgcctgttattattggttgattctctcgtgctgattcatgacacttagtggttaaagactcagatggtggaatcccactacctaggttcaaattcccagagccaccatttattagctgtgtgcctcgatttcctgatctataaaatgggggctaaaattacacctgcctgcttcctggagttgttgtgaggattaaataagtaaatgcttttaaagcaatagaattgtgtgaaacacacaggaagcactcagcaaatactagctactagtactctgtgggtccaactccctatctgtctacctcaggctccaagttggactgatcagagaaggggaccttctatacttgatcttttttttttttgagaccgagtctcgatctgtctcccaggctgcattgtcaagatctcggctcactgcaaccaccccctcccgggttcaaatgattctcgtgcctcatcttccaagtagctgggattataggcatgtgccaccacgcctggctaatttttgtattttttggaaagacaggatttcaccatgttggccaggcaggtcttgaattcctgacctcaggttatctgctctcctcggccttccaaaatgctaggattacagttgtgagccactgtgcctgacgtacacatcattttaaaaataactttattgaagcgtaatttatattcaataaaattcacatattttaagtgtacacttaagtgtaataaccttaaaatcatagaatttcacttacccaaccccttgtcctgtgtgattactatatgtcttctatttacacatactttataagttccactcaacaatgtttttatttttactttagtcaattgtcttttaagtaaattatgggaaaaaataaaacatagtattttatatttacctacttatttactgtttctgatgcttctactacacattctatagatccaagttcccttctggtatcatttccccttatcttgaagcaacccaatggcatttctataatgtaggtctgctgctggagaattagctaagcttttgtttatctgaacatgtcttttgccatcctcttttgacgaatatttttgctggtatagagttcttgattgacaggtttttttttctttcagaactttaaagatgttccattttctcctggtttccactgtctctgatgagaagtcattgatttttttttttctttctgagacggagtctcgctctgtcgcccagactggagtgcagtggcacaatcttggctcactgtaacctccgcctcctgggttcaagcaattctctgcctcagctcccgagtagctgggattacaggcacctgctaccacacctggctaatttttgtatttttaatagagacggggtttcaccatcttggccaggctggccttgaactcctgacctcgtgatccacctgcctaggcctcccagagtgctgggattacaggcgtgagccaccatgcctggcctgatattattgttattatttccctgcacataatgtttcttcctttgctgactgcttttaaaattttctctctcagttttcagcagtttgactatgatgtgcatcattattatattcattatatttgttctgcttggagttttctgagcttctcagatacactcataaatgagaagttttcaagttcgggacttttggggccatcatttcttcaaatatttttttgtactccattctcactcttctcttgctgggactcctgttatacatggtgtttggccatgttatagtatctcattggtccccggggctttgttcagttttcttcagtcttttattctctgtgttccacagatcagttcatttctgttgattattctttcagttgactcatgtttcctctaatgtctccatcttcattaagcctattcataatttttcatttcagttacttttcaattatggaatttccattctgttcctttttatagttcccatttatttgtggaattctctatatttctccctttaagatcatatactcatttatttcctttaatcagtttttcttccatcctttaaatatatgtatctatatatggatacatatgtagcactctctctatatatatatatctctctacacacccacatatatatagctgttttcaaatcgttgtctgccaagtccaacatctgaacaatctcattttttgtttcctattgactgcttttttccttgactatcacattttatatttctttatatgtctagtgatttctttttaccgaatattagaatcatggataatatgttgttgtgactctggatcttttcatattcctaagagtattggttcatcagcagacagtttaccatgaacgtgtgtaggcttggttttatgcttgttggtgctgagacattgaaagcccaaacccctcaacctccacatttaattttcccctcctgatgttgtcagggcaatgattttggctttgccaggatggatctagagtgggtctcactgtagacaaagggccttactcccaggaggtgcccttgcagtgtcagagtcatctgtccagggtggtaatgagatgttaactaggtctctccacaatttcagggccgtaagtccaacctcctgacactgctttttccccagcactgattaacctgtaccatctcttttctgctgtcaaccctaaaccagctgctatctgatatgcctcattggtttcaccttgtacctgtacaacccagccctaagccacagacacacaggcaacccctacacaaacttctagggccctgtatctacctcgctgtctcttctggatgtcccaccacagccacttcagcttcccacattccaacctgatttctgccttctcaattccatggggctgcagtgttgtgcttgaactgtagctctttgtgctgtcctcgggaaactgttcttaattatagtatattagataatataatgttatatgttatattttactttatatgtcacacatttactgaggacttattgtgtataaggcacagtagtaattggaagaaggaaaggtactagaatcttgctttatttggaaaataacaacttagaaaattttagagccagattgcattttctcatccaatgtccaccttttaaagatgttgaaacctggacccaaaaggtgacatgacttgtcaaggtcacacagttattgatagcagaagaggaaatagcctggcattttcccccactaaatccctccaaaaatatattttaaaagaaaatctaagcatgatgtttagaaatttttaccactatagaaaatttggttagtgccaaagtccctattgatgcaatagtgatttgagccagaattagaaaataagtaagtatgtgaccctaagagcattttgttcgagttacatagaaagattagcttatggcgtagagttaccgtaagttggcagcaatgaacaaatttggttctttgttacactccatctcaagaacatccagggaagagaaagctgttgcctgggtataatggtatttgccagaaaaaaaatcattagagaggtataattaagactagtttagtaactcattcaactagataactctataatgagtacatctcatttaccaccaaaaccatagagatattttgaagttttccccaaaagtataccttttttacatttctaaaggaaggagtgaggatttgcagtgagtgcaaccaagccaccttttcctcctgtttggccttattatcaagtatgttgctcagcaaacagccagtcctcagaaacttcactccaagaggctctgtcaagggtttggcacaaagagaatgtcgcaaagattttccagtgctctagaatatatccttgtattcaaaacccagttgtctggttctgggagtgagtgtggcaggaaaagctacaggtggatcccgtaggtagtttctcccataagaagtacaggccaggccaggcgcagtagctcacgcctataatcccagcactttgggaggccgaggcaggcagatcacttgaggccaggagtttgagaccagcctggccaacatggcgaaaccccgtctctactaaaaatacaaaaacttagccagacatggtggcacacgccggtaatcccagttgctcgggaggctgaggcaagagaatcacttgaacctgggaggcgcaggttgcagtgagctgagatcacgccattgcgctccagcctgggcaacaacagcgaaactccatctcaaaaaaaaaaaaaaaagaaagaaagaaaaagaaaaaaagaaatgcaggccactttttctttcagaattggcagttgagatgattcagatcaactgtcctgccgaggacaattagaaatgctggacaaaatattctaaatcttctttctggagcttggaaaagatgcctgatagaaacaaatgtgaatcctctgtggagaaagataacatcatcaacattttcaaattactttgaaaaccaattgtgtgaaaataaggttttggctgggcgcggtggctcacgcttgtaatcccagcactttggtgggccgaggcaggcggatcacgaggtcaggagatcgagaccatcctggctaacacagtgaaaccccgtctctactaaaaatacaaaaaattagccgggcgcagtagtgggcgcctgtagtcccagctactcgggaggctgaggcaggagaatggcgtgaacccggtaggtggagcttgcagtgagccgagatcacgccactgcactccagcctgggcaacagagtgagactccatctcaaaaaaaaaaagaaaagaaaagaaaagaaggtttcattcatgataccaaataactatatacacaaggagacaaagtaacctgagtgaaaacggggagaaactatagaccatagaaatagacccacagggaattgagatattggaattgtcagatatagacttgaaaataactgtatttaccacattcagagatatcaaagacaggactggtaattttccaaagaaccagatatggaaaagaaccaaatgtaaattttagaaatgaagaatacaatcactgaaatgaaaaaggcagtgaatggatttaaaagaagacttggcacagctgaaaacagttattgaactagagagagggcagggaaaaatactgataatcaaacacagaaactgaaaagaattgggaatgcagagaagagtacagaatatcagggaataagtggatgctcacatttatgaaatgtttttttcctacatctgacagaatcgttatttttaagttaatgtgaattacatattaacttgttatggaagtataatatagtggttatcttggtgtaggaggggtgagtggggctgctgtatagctggtggggttttatttcttggtctgagtaatagttgcatggctgtttgttttgtgataaatcatacattgtaacatccccctttcttgcatcttttgtatgtatatttcacagttttttccaaaaaaagatgtaagaagaagcaaaagtacaggtccaggtagctatatcattggcagatgccgaaggagatctgctccttactctgcctggagcacaaaactacagtttgccaccaatagggaggcagcacagagggacggccatcgtgatgcaatcacttccaatggattagagctgtcatgagagatgcactgttgagaaggattgtgaggccccatctggaccagagggaaggagcagcatctgccatgacgcgggccaacaagtggcacatgtgtgcagtgtagttgtcattttgcctggataatggctaaggaatggaagtggtagcttcaagttggcttggcttctaactccaactctgccatttaccaagtgtgtaatctgggacaatttatctgtcttacctaagcctcatttcttttatctgtattaagacggctggggaattaaatgaaacaatgtatgtaaagcacttatgtggtacccagcaggtgccgagtcctcgggaaatggtagttaatactattattgttgttgtttgctttagatcatcttgtctgcctttcaccatatgcagttttcttctaacacagggtttcttttatatctttttctctgaatttctcttttcaatccacattggtaatataaaaaattaattcaacttgaaggctgatattttaattactcctaaagttttaatttattggggaaccagttacccaccatccctttgctaagacaagaaccctcctttagtgttcctcataccatgtgtgggatgcagaatttattaatctggaaaggctaaattaaaaataaatgaaaatctctaatgaataaggacactctaatgagaacatgcaaaaatcataaaacttgaggctgtaggaaagctatccaggcaatagttctttccccgtttataggaagcttcttttcccagtaagaaaatgcattagtcacttttgaagctcagcttgataaacttactcctttccccaagagagaactatctgccttcctagttctagacctattttcttttgaaagccattaagcctgtgagaccattaaaagtgtctgttacttcatcagccaaatgaaggcagaaaacatgatctgtgagattcatcacgtctccagcttctagccagtgcaacatgattcatggagatcagaagtaagcgtgggctagtagtcacaacctgatgatgacagtggtgattgtcaccaccacaaatgctgaaaggagcactcatttttagaagcagtcaggtatgactttggaagatgaggacccagagttggctagtgagttatagtaagaggatatttatctgatcactatccctgggagggaacttgttggctcacaaaacttagaagccctccaggtggaatacctcctcctggcttaatggaaaggtgatggtggcacatagaaagccactctgtcttatctgcgagtcatcctacagttgcgctaccacatctgctctccacccttccccactctgctctctggctggggagtcgaccagatggcctccatcaacaggctgcctcatctccagtctgtagttgggttcagtcgatggggagccgagcaagagatcagcaggtgggagtagggtgaggtcaggttcttctgtccccagatccttccctgcaggtctgggctggcattgtcacagcctctccgagtggtcctttatacagaatgctgtccttcccactttctgtaaccactctttccacttgcttcttcagcctagtggtgctaatagatcactgttgttgccacttccaggccacccttgtggttctctttaccccatcataaaaagcaccagtcatctcaaattatcttaatttgagtgtgaggagatggtgggacaacctcgtagaaatatctagtaggcttatgaagcatgtcttgaactcagaagagaggacaaagaaaataaatgtaagtacaggtgtggatgcatgtacttagtggtgactattggactcttaggaaggagtgaagtgcatgaattttctgagagagagtttagagagagccacacaaagggcagaagactaacagaataaaagggcagagagaagctccacccatggacacagctcacaggtctagtcttctgggaactgttttcatattttcctaggtgaagatagtctctccctctcctctatgcttccaccgtcctttgggcataattcttaggaatattatcactgaggataacccccatgcaggcaaaactccagtcactgcttgagagcatctgataacaccaaaaagactggatgaggttgctgcagcctcccaggatggccagcgtgccctagggcctggctgctggttggtggggcagcagctgcagtgtcacttgagacccggttagaaatgcaaactcattccccacccatgatggagaattacaatccacattttgacaagatcctaggggacctatgtgctcatttaccctaaagggtcccactgagacctgtgtcacgcttctaagaccacacttcaaataacaatggctgtcactgatatggcctttactatgggcctgatgttgttctgggcactttgcttaaattaacttgtttaatcctcacagcaactttatgggataggtaaacgatcatcctctctttaagatgaggtcaatagttggtacaaggacacatggatgagatgtggtgggattgggattcattggagtcatttggctccaagggtccctcttcttcaaccactgcactctcctccttctcccacctcccatggcaatcagcagggtgcttcataggttctccgtaggtgcttggaagatgcacaagtgaatgatggcatagctgtctgtggtagcctcaagaaagggaaccttgatcatctggggaaaactttctacagcctgggtacgcctgtctctctcattacagaagggagagactctccgatagtattttctcagatagaggatgtagctgaggatggaaaacttcattctagattcccctgtgggagaagctggtgtttgatctacattttcttagaatctgcatcgcaaatccaaggatagtgaggttcaagggcagttatggggctcggtgggcacagtaaggacagtgcccttcacttgaacacctgttttttttaagtttttaaaaattgttttaaattttctttttgttttttagagacagggtcttgttctgtcacccaggctggagtgcagtagtatgatcatagttcactgtaaacttgaactcctgggctcaagtgatctgcccacttctgcctcctgaagtgctgggattacaagcctaaagccactgtgcctggccttgaacacctgtcttaagagaaatctatttctttcagatgacatccaattctaagaggaaggacttgtagcgaagcttagaatttgcccaccatctagtgactctttttgtttggatttggctaaagtttatttggaaatacagaaggcataacttgctttggtagggccagcctctcagtcagccatcattcagctaatcagacatctggattaagcagtatggctttctcttccattctgcaaggacagccagttcaagttaaggagcagctttctaaaactccatgtcctgactcctgccccagtcttgaaagtgggctgtcgccttaatgctggcttgaagcacagcagaatccagagtcagccccactcctgggaagccctgactacatcgggattggggatatcacatgtagaaggggttttcccaggcttgaggttgactcgccatttcttttcatccaggctttccgtattggcagaatctcacatggtgccgcagccctctcttctgttggattgggtcgctgagaagttgtggttaagattgccccagtaaagccagcagagtagaggacccctggcctaatgctgtccttcccctgcccctctgtggcaccagatggggattatttcctccactttaccagcgaggacgttatcaggagggccttcctcgtgtgcttcctgaatttgttttcctgaaagtaaaagtgatatctgcttcctctgatttcacacacaagcaacaaactggttcctcaaacctctttccagggatttctttgagagacagaacaaagccaggaggagcatggggctgacagacggagagccctgggtgtcctatagctatccaggctacgtcgcagtctggaccccacagccctggcgccgggaccctctacctgcacatacctgaccaggtcctctccccattcagccttcagcttaagcaccacttcctggaaagcctttctgcagcctccatgccaaaggaggaccctcgtggtaccctattctgcttctttaaggctcttcacagagtttattatacatcagttgcatgattatttgactaatgtttggctgcctacaagctctgtgagggcaaggcctgcagggcttgtagtcaccaccgtattcccatctctagcacgcaagcatggctcatggcctgtagagcttagctcagtaaatagtctttgagtgaaatgaaggtattgggttaggtgatcccaaagtcctcttcctgtcatggcaaactctgagtccacctatgagaaacttgtacccaccaaccccctaaacccaaacttctcttttcctagttcagtgattctcagcactgtcttctgatgaattctgtcatcaagcctccttgatcgttttcatactttcctaaggcttggctggaatctttgagtttgaataattgggaatgtgaaatgttcatgcctaaacaccaacagaaaagcagagcgtcaatgtggaatccaaacaatggaatctaacgttggcaatgatctccaattctagggtcttcaacagtttctccctgtgccctcccatctcatgtgaaatgactcaaaatatgaattcaaaagagggaagtatgggttgaagattacatgaaaagaatagagtccttaagaggagccttgaatcaggcacattaccttccagccccaggaagttctcattttcctctgctcataaaggcattttcatactcttttgtgatagtatctctggggccctgagcagaacacttcatcccaaaagtagggcttggtgagatgctgttttataaagcaaaagaggatgtgatctgttgtcagccctcgtcagtcatggtggacaatatggaccaggtaatggaagcaccaactttggccaatctgggcatctccaggctaacctcaaaaccaccgtagagaaaggtgccagacattgctttctgcaatggacggcttctcttgactttttaaggagaaacagtgtgatttatagatgcaggtcctctaagcctttcctaaccggaattgtcaagttgcaccccagagggaatgcgggcagcactgtaagaggaagaaaggaaatccatgtctgccggctaaactccatcctccccttttcccgagcccagcactgaatgatgccactgcccaaggccccatctccctggaaggtcttcctggtaccttgagagtctttccacccgccaagaggcagtcacttgacatgaactccaaactagcgagactgaatttctaggttatgtgctgtttgatctttgcatggaaccgtatgttccaaattttccagtagagctctcctgtcacatactcagtcctattggtcccataagtacacatgtgtttgtcagatcttaccctgatgtagggctagaaaaacaggctcatcacatgcgtgggccaatagtgatcttgtgttcacagaacgtttgtcagcagttgcttcaccaggcttgtctagggcccattttctttcaccaacatgagcagccagccctgaagaaggcccgacactcgcttatcagcggtgagcatggcctatctgagaacacttgggtggagaaatgtcgtgtattttccaaattagaacttgagttggaggagctgtttctggggcagctgtgagccaatcccaagaagctgttaaacatccaggccctgagagccaaactctacatggcagggtagagaggaggatgtctggccgcacgccttcacaagccagcctggctctgccaccccaggcaggccgcgaggaaagcagatggaagcgagagcctttcctggaccagccttggaaacatctgggctctcctggaagcagggactccactagactcccccgccttcccagcagatgctgcaagcacgtgtcactgctttatagactcaggtcgtggaggctgagagctgctgtctaagcgtgtggggggcatttgcacagtcgtgaagccatgggctaggagccagaccacctggcactgagccctgtgccaccacttcccagctgtgcgaccctgggtagatcactccactgctctggacccactcttctcatcagaaacatatggttacaaatagtgcctacttcctaggttgttgccgggaggagatggaatgatccaatagagtgctgagggctgctgtcgcccatggcaagtcttcagaacgcgctcatcaagttggagggcctttggtgttccagggcagtccttcacccagtgacagaatccccagtcaggcacttcctcaagtcactgcttggatacctctgaggatggggaatcactacctcttaaagcaccctattccaccttcagataagcctgtttctcggacagataagtgtttatctgtgctgaacctaagtctttcccggacacttcgcagttggtcgtagttccatcctgtggtcagacagaactcatctaacccctcttcctcaaatagcagttgagatcctctgaaaatcactgacgttaccctcctgcctgtgccttttcaccattcctgacaaaacaccttcaatttcttctaatgattattgaatgatgttatttccaattctttcattcttgtggtttctgtcttctgaaggcaccccgtgctcacgcacgtgacttggctccatgtgcatggagtccctccccacgtgcctgagacacaaagataagaagatgtgatgagactcaaggagctctcagcgaggcagggaatggctttccaggcaggggagccgcgtgcgctgggattggaggcacgaagccagagaactgcggggtgtattgctcaagcctagggtaaaaactgggagtcatttgagaccaaactggggaaggaggcaggttagtttacctgcaggtgacagggagtcactgggtgactttcagctacaaagtgacatgttccagtgtgtactttaggaagagcattttaagtgtagcttgaagactgggcaacactggaacccgggagaccagttgacaaaatgacgagcaccaaggggacagagaggaggaaaacgagtcatggatggaaaagctaacagtggctcttctcctgggggcaggacaatgagtcattgcttttttcttcttccctgtgttctgcaatttctctataataagtattttctgttttctctataattagcatgtattatttatacagtaagaaaaatgtattcatgtctaaagatacttttaaaccaaaccagcaggacttggttactgagtggaagaaggagcctaggagatcagttttctggtctgggtgctcaggtgagtggcgtgacccccagcctggacggggatgtgaggaacagggcatttggcaggaattcttatggcatctctgacagctgaaatgacgcccacaagctgctttcactccacttggcctctctccagcctgttcagtggcctctgtcccctgcaggccctgaaactcacctgtcccttagacacctatctggaaagcaggtgtctgtgcagcaatactcaccagcgctccaggacagcagtagcatttatttagatgataagttttgtcactccttcagtaaatatttactgagtgcccacatatgctcagcaccaagccaggccttagcaacaaaatggaaaagaacaggcacagtccctctcacaaaactcagcctaatgtgagagacagatataaatgttttaaaatcccgttaaggaacataacatttcaaactgaggtgcactctccagaggatagaaaatagttccaagaagacataaaggaaacgtttctggtctgggagttgcgtgatgatccctggggaaacagatgcttgggctgagagtgaaggataagtgggagggaagtggggaaaagcattccaggttgagggaacagcatatgtggtggccctgtggtgggaggaacagtagcatattcaactctctaaaagaagagctgttttactggagtgggttggggagaggcagtgggtggagaggtgggtgtagccagacccgacagggccctgtagggcacaggaaggatcttgtcttcatcctaagagcagaggaaggcattcaaagttccagcaggcctgaggcagcctgctgagcagccctccagctgtggcctggaggggagcctcccgatgggtgtccctttatgtcccacacccaccgttctcttgccattggaggcggtggcactgaggcccgtcgagacaccccttcatgcctgggtagcccagatttggggttcccaccacctcgagtagcacttggaagacgtcccccaccccccacccccagcagatgccctgaaagccgctttgcagttcagttttcaactttcttcgcggctctgcatactccaacactaatgtgtatacaacttgctaattaatggaatcatttcaatctgaaaacatcttgttctaatgggaggctgcaagcactcttattaattcacaggtaaaatcattccagcttttctcttctttctttttttttttttatcttcccagcttggcttaatagctgggaagaatcattctaatcagccttgcgagaatcacatcaccagaatgaaaagcaccaacaacggccttggggtttgggaaaggggtgaccagccttagtttacccaggggcaagcgcggtggatgaatgtgagggtgagatgccccacacagaaggtaaagacacaaaaagtgacctgtgtagtgcgacttggaggggggtttcctgtcctgtgtgtcagaggtggcactcagggtgactttctgcaccactggctctgctggagggaaggaggagctgcctccacattctcacctggcatgtgagactcactgcactcacctgggcaggaatctcacacgtgactttctcggggctgggtgtcatctgggggtgacttgctgataaccaccttcctgtcatttgcaaatgatttgcagtgtccctttaaatgaatgccatccccagtgtgttatttctggtataaccgagcttagtaaggggggccttctccccatagaccgcggtgcaagccccagacctcaccgacaacacccatgtccccaggcgggcttttcctttactcttttttaccagagggatctgggtgctttttagagtttcttttcttgtggtaataagaacataacaaaattgatcatttcaatgattttcaagtgtacattcagtggcactaagtatcttcacactgttgtacaactgtcatcaccatccagctctgggactttttccaatcccaccatgggaaaaacctcgaggataaatgagtccctgcagggccgtcttgagtccacatgagctctcactgtcctgagatgctgctctaggagaaaaagatgctcagttgtctgtaagatggggtattacacaatttgacagttatggatggaaacaacatgttcttccccttggaagtacagcagctgccagtcctttgctttggatgagtctccaagacagatttggagtgaggccaacctggatttagacccctgcaccatcagtccttggcgtgtggctctgagcctcagtcttctcatctaaacaacagggctggcagttccttccttgcagagttgctggaagattgcatgagatggcgtcagcacggtaccgcggtgatgcttggttcagtgagtggctctgtccccgcaggtctccaggtggtcctgaattccatcatcaaggccatggtccccctgctgcacatcgccctgcttgtgctgtttgtcatcatcatctacgccatcatcggcttggagctcttcatggggaagatgcacaagacctgctacaaccaggagggcatagcaggtaagaggggcaggcggctgcgctcccaaggccctgccctctatcgctcccagcacctttcccgctgctggctacaccaacatgaccagcagagcccagggaaggccccattcattcagacacacactgggcatggttaagtgagaggcagagacccgtatcctttttttctcagttccaatttttgttttaatctctgttaaaccggcctaacgcaaacttcgttcagcacttttcaataagctacacaatttgagaaacatttgaataacttagaacctatcttttgtcaatctacgacttttcaagccaaccctgagtattttaagaatcagagctgacctggggtcgtcagtctctgctccttccatgcttcagtgtggttggccattgggagccctttcacggggccgcttagccctgagcaacaggttctcccagcaccactctaagatttttctaccttcatggtgctgattccagatcctctgtaattattgtttctgcttctccattcacaggcagatgccccagagcccctattccaggtgggggaggagggcaggtgggaatcacccccttgccggcagccaaacttcctcccttcaaggagaaggcttagttctaccccatgactcccagtcccttcctttttgagccttcccacttcacgttccttccataaatcaatatatttaacagcaatgctggctcattaggcgcttccctgcgtggcactggagttttggcttgcaggatatgctgcaagctgctgctaaagctactaacatcgcagcttggccttttaaagaaacatttaaacagaaattgacaaggcttttaaacagacatatacagtggcttaacacaaagaacttgttgaaaaaataacacccaccccaaaggggctagctgtgttaaatatatatgatttttttcacacagcaagatccatcatcttagtttttagcatcttggtggaaaaaggggagcatcatctgccggaaacagtgaaggatacctaattttctccatcgacactgcacctcattcccactcagtcccagcactcagttaaatgggacctctcgcttcattggggtgaggagggatagcttccaaacaacagggagtgaaattcgtagcagaaaccaaaacagaatactttctatgtatgatctagtatgaccggatggattaactgcatatttgagggcatttctagtttatttctacatagccacagtcctaaaaacaaaacaaaacaaaaaaccacacacacaaaacgtatactcctatagacacagaatcacacaaatgttttcactttttggatggaagtctgtttaacaggagactgttttttcactctagagagaatttccaaattacttgggtcataattgtataaaataaactatcctgttttcaaaaatggaatccttgttaagttggaagaagcaggtcttgcctgtagctaaaattctgagactttttagccttgcttaaagaaatgcgaaaccatatatgaataatattttcccctttaattaaaatccttccttttattcaggttgatttatagctagctcagaaccaataaatttatatgaattgtgtggccctgtgagagctcattttaagactccttaaaaactgactgtggtatgtctgaagttcatgcagttgtattgaaattatcaatgacccatttgacccaaactcctcaggaagtctcagacatgtggagtctcaaagattccccatcagttcagcagtgaatgatggtgaggccctcactaacaaaatgggggagagcgaaatggtagaattcagccatcgagccaaagatggcggccctgctgtgcaatcagaggtctgtgcaccacagagtaaggagaggggctccaaagctgcaggcaatttccatcatcctaacgagaaagcagtccaagagtgttttctgccggtggtgggctcctgcaagggcgggtgaggataagcggccctgaatactggttggaagcccaaggctttgttaccaggcctcagaggccctggatagtcagaaaatggtgagcatggtagacaaagaaagcatggcacggggagggagccgtcctgaaggccatagccgtagggcccagtgaagaggtcgccccaacgccccaagtaccgaacctgtcatggcctcctcttctcttaggacaaagataagacttggcctccccaattggaatggccaatttaggatcacattgtccacccttgatagtaaacaggaccaggaaaagtgcctgagaagttgcctcctaccaagagactcatcagattgtttatgtgatgggtttatctttgcctgcaagttcagaagagaagtaggctcccatcacagaaatggccatgagccaagggggccaggacaacagcagaagtgctccagagagaagggccctgccaggctccatgagaaggtggcctcactcattcgctggagtcagagtccctgctgggaagaggggcccaggacacagctgcagaagcctgtcctctcaaatactctgcaatcaggagcttgctgtcccttcgttcccaaacctgccgtctgatcacaagccaggacccactctgtcactcttagcacaacacgatgccgctgctatcaagcccttgtccacccacagagtgggcagtgcagacaaggagggaaaatacgcgagaacccagacatgtctgtgcagccgtggagtagaagaccaaatacttgcaggctttgaaaccaacccctgagtgttttggagagttttatataaactttggaatgggtggtttaatttttttctttctttctttctttctttttttaaaatttcagactttggattgaattaccctattttccgcaaatttagattacacaaaagtgctttgtgagcctttgttgtaatttttgatgagatttacatcaaattctttttatagtccaatattatttcacagactgtgaattttatgtatctctagatttcaaaatacgtttgattttgagccatgtttccaataaaatccataaagaaagttatggaattgtccaggtgagccatgttctacctctagactgcccttccagggagcagccccggtgaaggcggtctcagaagaggcggcgtttccctaatcccggaggcatctgcaaggcgccttctcagctcctcaacagacacatcaccatatgccgataccttttgtttccggttgtcccatctgtttgatggtgcactgagccaggtcactctgaatagcttcccaatcacagtaattacccctgagactggcacagagctggttggctaaaacctagaaatgaaatcatcttcattctatttactccttaaagttgagttttaaaaaagtaattgatttttgtcttcagtgatttctccttggaatcactaactggagctctcccaggattgcatgtttgtgttggtattaactgcgtttctaactctctcctaatcgtcacctccattattttaccgaaaacttaatttggactttccagaatgactctacctctcttcatttctgtcttaaaatgtagaacctgcattgctttgtttctgtctcccacttcatgttcccactttcctccccaggacttcatgactctgcaaaagaaaactaacacatttttacatttaagcaaatttctcctcaccctagagtgtgtgttgctaggacctgctgatttgtgtgtgttcacattttttcaagtgttcgctttagcgctttttatagatacctatttttaccagatcatcactgcttcttaattgttctcaaatctttttcattattgttcaaatcggattttaaatagcagagtggcactaaacctttagataatgtttctgaatctcatccctttctctcttattagtgagatcacttccccttgatgccattttctttttcgcagatattcgtaaaatccccagagatgttttcctttctcgaggacactcagaattccctttggcagccttctcctcttccctgtttgtgatgtttcaggaactgagagtgcagggaatgctgtcagatgagtggtcccaatgtaaagattaacttcatctttattctgcgaaaaagcaaaacatgagaaaaagatgcaagaaaaagatgcaagcttccccttcactttttcaccctttctctttgtcccgtctctgctgtcattccagtacttttatcacagtgactgaacacatctccctagaaagctatgactagaatgggtgacaacccaacataattaatgatctaattggctcttggttttccagtctctcagctcccaaatttttcggtgcttattatccactttttcatgtattatttaggcttaggatttacattttagcctcccccttttttgtagcatcacatccaaatctctaaagatttcacatttttaaaagtcataaaaagttgtagttagaggactgcttgtttcagctgcgttaatggagccctcctgggagctggaccctgaaataaggaaatggtgtggatactgtctctctagcagttcagggaccagcagtgcagacctttgcaccttgatcaacgaacacaggactcacacacaactttaagcactggcccaagaataagccaggaagcagcattattcataatagcccaaacctggaaataatccagacgtccatcagctggtgaatggataaacatacaatgaaatacactgctcagcaataaagaggaacagagcctactgatatatgcagcagcacggatgaaactcaaaacattatgctaagtgaaagaagatggacataaaaagcctcatagtgtgtgattccatttatatgaaatttctagaggaggcaaagcaatggagacacaaagcagatcaggttgccagggactggggatgggaggaaggattgactgcaagcaggcgaggggggtttcagggagtgatggccgtgctttaaaatggattgtggttatggctgcatgactatataaacttactaaaaataattaagatgtacatttacattgataaattctgaggcatgtaaattataagtcaataaagctgatggggtcagtgggagagaaagagaggagaggagaagaaggaggaggaggaaaaggaggaggaggaggaaatgacagaggaggaagaggaaatgaaattgacagagaacaaggaggaggaggaggccacaaagatgaccacgaaggtgatgatgacaatgaagaggaggaggcatgtaaattataagtcaataaagctgatggggtcagtgggagagaaagagaggagaggagaagaaggaggaggaggaggaggaagaggaggaggaggaggagctgccactgctgctgggaagacacaatcgggcatatattttcaagtagactctattctcctaagaattatctcttacttaaggattaatatttctcttctggtcttcctcttgggagtgaacagtttcagatttaaagccaccgactgagaatcagcccaccggccagtcctgttcaatgcacagcctaacgtaggcaaagtaatcacacttacgattgttttgatatatatgaaaccagaaaataatcctgggttatctgttgtctctaaatgaagaactataagcaaattctctctctctctctctctctctctctctctctctttggaagtgtattttcattgttataggcaatcatttatttgttggaactggggtctcttctgtctgttattgtcattactttgtctaaggacaggacaatgtccttgatttcacaaacttttgtgaattccacaccgttaccttccatagccagagccaagactttctcagtgttttcccataatggaaattcttagatcagtcaggtcttgtttaaatttaccatcaatctccacactcaaaatataagtcacatcttcattcattaatttgctgggagctattcccagcacgtgaaattagtccaactgctgcatttagccacagacactgtgttctactgtttcctgacaaagccccgtccgtactgaggaagcacactccctattattcactgccgctctatcttgatagaggtcagaaaatgattcttctcttctgaaaagtattcatgctgcagagcaaagggcagagctgtgaagtcccacatgacatgcatgaaatacagtcagtagcgtgtactcacaggctgtaaggaaaacggctgcaggtgatccctctccccggcagtcagagtccgttttccgtctttcgcctatgtaaggcttcactgtaaagtgacttgcgtccctggcaatgtatcctctaatacatagtggacccatatagttagaaagctttattggatgggatcggttggctaactatgtgaaggagtctttgcattggtattgtccttaccctaaattctggtattccaatacaagtgtctatagaactctaccaccagaaaaagaaaatatggacttctaatcgctttctgggtcagtttccacttgcagtggtggcatcatcattattttttgattggccatttgattttgaggctgacatgttgcagcagaatgggcaatagaaatcaattactaagattaaaatacagcttttacaacagtgagtggaaaggactgaccttctaaattaacagcagcctaaatggaaagcctactttcttgtgttgcttaattcacatctggggacctgatttaaacatgtcttgcgctgttgttgccatggttgctttgcccatcccatcaacctcatcctgtcacttttctctctgacttctttctctgcccacatctctccctccctgctgctcccgtctcctgtcttcttctggccatttgagatgttccagcagaagatgacccttccccttgtgcgctggaaacgggccacgggcggcagtgccagaacggcacggtgtgcaagcccggctgggatggtcccaagcacggcatcaccaactttgacaactttgccttcgccatgctcacggtgttccagtgcatcaccatggagggctggacggacgtgctgtactgggtacgtagcatgagtgggcagtcagagggtgggggaacagcggccgtgaacccttccctgacacctccctttctcctcctccccatggtcttggggtcacatacgcatcttgatggaatggttgatgaagagcgtctttgatttcttccaggtcttgcctgagaaacaaggcatgagcttttcaccctaacgagtcccctcccccacccgccagccttaggggaaggtcatttttccagtgcgtcccacagtgcaaaaccctggtgtgcaggcatggatgagctggccaggctggcacaagggttccgttcaactcctcctcccatgcagagttccttctgccctcatccttttcttgcctctttcctcaaaagggagctagaaggcagaattatgtattcttagggcagaagagaagaagtcctgatcttctaaaaagaagttatataaagaaaccatttttattgaattgtgtagcattgtgacatgctattcaatttttactttttattttactcttaccttaacatattagaatagtccatcagacaaatgcattggcagcatttttactattccccaaacatgctgctggtcatgtgatgcctatttagaaatacactttttttttttaatttttattttactttaggttctgggatacatgtgtagaacgtgcaggtttgctgcataggtatacatgagacatggtggtttgttgcacccatccacccgtcatctattaagccccacatacattaggtagagaaataccacttctcgagagccacccaatcaatagcaaatcttcgtttaccttaaagttgccccttttattacccagtagccaacactactttgctgcgctttgagcctctgaagtgccagatttttgtacagcctaccccacaggcaaatccacactccatatttgagctgtctcgattctggcaaagtccattattaggaaaaactccagaaaatttattcttcatagtgtctccaacttcagcctgagaaatgacttgccagaatccagtgttgttctccagaatttgggcgaataaagcatgctgccagtcttaaaaataccatctccttcagagttttgcaaataggcaaatttatttggccatcgtgaaaacaatctaagagcctgctcagggaacatgtctacaaaccaaagcagggaagagtgagaggggagcaaatgcttcccgttgagcagagctgccagatcaaaaggaaatcatgccaagagaggcgttgacttcttcctgaatcggaaggaagagttttgtaactgtacggagatttggtgcacagtattctgtcatatgatttctttaaaagcaccatgtcctgttgattcagaatccctctttctcagtttttacatgatagtcaatatgccaaaccccagtgttgctatgacatgtgtccctccctctgtaagtgacaacttgaaacttgcccgaggaccttgtacccagcaaacatttcctgagtgtccttgcctgccaggggtgctcctaggctctgaggattcagtcataaataagatccagtccagtccaattatctcagtctaggaagccaactaaactctaaactgagtaatggcagtatggctggacccatgccgcggcaaagctgctgtgttgtgatactttcaaaaagaagacaaaggtcagaacccctctgcctcaaactaaaatgaaacactggaaaacatttctgagattcatgctcaataagaccttggttttgaataatttgtaagacagaaggaattgaacttattacacttagggaaacttattttgtttagcaaagcagacaaaattcccaagtggacctagctggtccttcttcctggggtgggtccctctgaccagccaaggacagaaacatccttctgccaacaggcagtttctgcctacaggccacataggataaatgattgtgtgggactgtgctttggggcctcatcccataagcttcaggcccatgcattccatggcatcaaactgagggcaggtggcagtggagggtgggtggagggtaggaatagatatgactgcctttgctgatgtatttttgtgttcttccttcaccactcccttcttctcccaccaccacaagtcattgatgccccaccagccagatgtgatccaaagaaatactgtcataatgacagccggggcggggagcagaagcagcaacaactgcaaccaccaattttcagcagctgtgttgtgccttctcccctggggagcgtgtgatagtgctcaggctgggaatggaaacagtgtcagaggtgaagaaacaatcccaggctcatgggacatgcctctctctgattttcccagcaccttcccaaaatggccatgttgtgtgtgtgtgcatttgtatgtgtgtgcacgcctgcaagtgtgtatacacacacgtgcacatacacacacctaaaactgaaacttgggtattcatgatagaagccctgcctagcccagtgctcctgctttcaatttctctaattgctttgacctttctacggctgtttcttccttcttcctccctctccctcttcctttctctccagtgtccctcctccttagcttctaggccagtatctctaaagcacagactctcaaatctcaaaatgttctagcatcaaacatagagctttgtaaatataaaaatacccaaacctccctcagagccattgaattagaagctctaaagtcggggccccagtatctgcattttgaaaaagctctccaggtgattctgatttccaggctggagtttgaaaacgctggaaatctaacctgttgaacctcatggtgctggtatgatgctgctggctttgaacccttctaaggagatagtttccacagggaggagggggaaataaggcctttcactcagaagaatgaattgtccttcaggcacaagggcaagtctaaaggacttgagaaggagcagccaagattttcaaatatagtaatgcatggaaaccccagagctccattcattctaaatcaccaaacagctggaaaagagtaagtcactaaagcatcaaagaagcgattggtcagccgctggttatggcctgagatagaagggatcagggaaggcacctagcagatggcagcacttgcttccagttgtggatgatacagtatctttctcttttcctctaacatccgttattgcattccattgttagattttaaagagtggactaaaaataaaatcagacttggtcgagtaatacttgaacattgcttcagctatgaaagccattggccatgcattgcattgaggctccaacaagccgagcaatttgctgaaaacatttcttctacctaatatcctgtttgaggagtgtgcagatgacagaataaggaagggtggataccggggatttggaaatgaaacaaaactcgggtttggtgtatagtttccttaggaaattacttcttaagccaaaggctcatcctttactctcagaatgtccaagactcttaaaaacagatgggtaggtgtggggagtgtgatcagataaaaagcgctggccttcttcagaggcagtgaagcaccaaggagggaagaacctaatgtgtaacgttaccattgttttccattcttagtttcacgttttgtttttttcaaaaatctaaacatccctagccttttgcacatcattcaaggctgcttgtctcccatggtctacgcatgagccatctcaaagatgtaaagtctgctgggtcagcctcctttgcaggaccttgtcgataggattcataggcatgctctgagaattccagttggtttgaaactctgagcatgacctcttacacactgtgggcagtcacaatcaggtaacagaaatatccatcaattaaacatcttttcagtgctgactttgtgttcagcacttgagatgaggcccctgctcatgggaaacagaatgacatggccactgataggggttggggacacacgcagaacgttgcaggtgagaattgtggaaggggggcagcagctagactaggcatcacactagaggatgtgtttctagctctttaggaatctcaatgcctggataattcatcaggagcattctgttgacttctgtccaccccatgcccttctgggatccccaagaatgttgcacactgtgaaccacagtaaagagcctctggcccgcgttatcctgggttcatgccccttcccatcctattgggaccaccctcttcctgacaccacccattgcccctgcattagtttctccgtgatcagttcttcgactgatttttttttacaagttaaaaattaaacttaaaaattaggttataaaaaatacttaatgagaaatcatctaaaagaaagatttttttagagtcacaaatagtgtgttctctagaacctggaatttgttttggttcagccaacaggagactcttggaacaaaaatctaatgagttaacttttcataagtcacttgtcagctccacccttcatcttgccatcccactatgtgtctggatgtgcggagaaggtatttctattaaattcacacacacacacacacacacacacacacacacaacagctattaatctcttggtattggtgctgctgaaatatccctcgtttatgacaaagaccttttgcatccaagcaggttgaattgggtgttttaccctatttttgtctactccatcttcacaaagccacctcctttcactgcagaatatagagttgctgaaggcttcataaaagttagagctgaattctgctgatgacctaggagtcattctaagtgaggagctgagaaaccctcaagtaacccagaaacagtgtccagggccctttctcaggtatcggagtagagaccgtgttaggacctctgtggtccctgacttttcacctgcctccgtgctacccccagggtgcacctgttgcctaaaatggagaatccctgatctaaacagtaaactggctgttcagaagcatatcaaggaagagagtcagcatctctcaaagccattctttatttatttattgggtttcattttatttattttgctggtattagatgagtccttatgattctgtaatttaatttagcaaacatttattgagcatttgctgtttcctgggacgagggatgtgggagcacagagaagaataaggcctgcccaggcagttcaggtctaactaaagagttgcaggacatgcggaggaacacagctgagccatgggggtcagtgccctctgtgggagcaggacagccctgaggggcacagagcactccaggaccaagtggggctttactggaccaggagagaaggctcttctgcctggggaaagcaagctttgtctcagtttgggaggccgcagagacctgggttttaggttctctcaacattgctatggctgtcagccagttgtctcctgcacaggtcttcacacactggggcccactactctctatgacagctcccaacctcccacatgatgtcagcacatgagtccatctgattccagggagtttgaaatgcatggaggagcttattttgttggcttgccttggtgttaggagcttgttgttttcttcccccatgtaaactaagcttttacctgggctctgaggcactcccgggttttcagcactcaataagcaggtgcaggggtggggagcagccaggtggagcctgttccacaacttcctgctcacttggtgctccgtgaggtagctgcccgtgtcccagcaagcaaggtgacatagattctgaaagccgcaggttgatggagctattgccctgagctgactggtgttcactggcagcagcagatcctgtcccccagtgacagtgtaaagcaccgtggctttcacagatttacacctcctgcctttcgatggcaggtgtcagcctctctctcgacatttgctgaaacgattcagcctttttggatccacagtgcctgtgccaagaaccttacaggaaaggtacacacagcttgagaacccgtggaagtctgctgggctggggagttggcctcgaggagaggggctagggaagcttattcccctgtttatctttttggggaaagataaaaagtggacttgagggtttaaatctggggttcccttcaaggaattagatgctggttgccgaaaggtctttgatagtgttcattcaatgctccctccctttgtagtgaggctgtttcagccaaggcaggggccgtcctgccagtacttgggcctggaggccctcaaggctacagacaatgagctgactttccttaggaaagtcaggagacctgaggaacacggcttaatggctctagaagacctatcccttatttcacctctaaataagggtgtcagcaatctgggtcatttttttttttaaatctgactttattctttgtcttcttaatagctccatttcagctgctttaggacatcaatctcatgactccaggcatcgccctacttcagagccacccagctttgtgtgctctctactcagctgtccccccaaagtaggtggaccagaataaagaggagaaagtaagagggaagtgaaaggagaactttcctttcagaccagagccaggcaggccagagaatcaccttctgtggcagccgagcattgctcacccaggcagtggggttctgaggaccaccctggcctcgtccgtctccatctctcatctgtcctcctgcttcctgccctcgcctgctgttccccatctcgaacctctaaaaaaccagcccacagcccaggggggaccaaagcagcagtgtgggacggcgagggggacccatgagtttcctcttatggtcctggctgtctgtggggccatgaccttgaggtctgtagctccccctttgaagtccttcatatgctggaagcctctcaccttgtgtgtggcgcagaagaaaggattcccagactaagctcgggccttaggaaatctccaaggcgcgtgggtttgtgtggcctccaaggctgcattttctgtgaggttaaatgttcacaaaatttaaggggtgtgaggaactagtgaggaaagatttcattttgaggaagttgcctgggcgccatcgagcccaactcccactcgccatctgcccaggctccagaggcagctttgggaggggaactgtggtgagcacgtcgtggcctcctggaactggctgctcccacgtgtcctgaagaaggtggggtctgtgacccagagaggagcaaggggagtttgccaagaacagacatcctctgccactcttgatcccctgacgcacacggggcaagctcctttggggtcgaacagaacagaccagttgtttggagtaggtcagtaccatggggttctgcacgcgcttcagggtgccggcgtgccctcgaggctgtctgcaggatgctgtgtgtgtgcagtgcacattactgctggtgggagtccatagttctcaaaagcttttcctgactgccccaccctctcaaaaaagtaaagcaggccgggggcagtggctcatgcctgtaatcccagcactttgggaggccgaggtgggcggatcacgaggtcaggagatcgagaccatcctggctaacacggtgaaaccccgtctctactttaaaaaaaaaaaaaaattagccaggtgtggtggcgggtgcctgtagtccctgctactcgggaggctgaggcaggagaatggcatgaacccaggaggtggagcttgctgtgagccaagatcacgccactgcacctccagcctgggcgacagagtgagactccacctcaaaaaaaaaaaaaaaaaaaaaaaaagtaaagcaatactcatttagaggaaaagaaagggactgcttctgaccctccttagcaggacttactctgagagaggaaaagctacaaggacacccacaggctccccctgaccttggatccaggtttccctcttcctcagcaggtgcctgggactcccattccagggctgtctcaaccccattgccttccctgtatcagagagtccgatacacaacagaacccttacacaagtaggcgctcggtaaatacttgttgaacaaacgtggactctgatgtgaccactgctaagaatagtcaaagaatgacctcacggttcccatcgtcaaatgggacctgcagaccacagcccatcgtggccagcacggctgtcagtgtggcctgtggtcaggcagctcatgtggctctcatgcctttctctccctaatctcatgtcaccaatcccacccatcctgtattggctcgggtttgtttttcttctcctggtgctgaagtctggtgtggtttcctttgcactgttggttcagacagttaccttatcgctaaaggaaagctcccaggctccctgggatggggacagtgtctgacacacaaggacctttcaccccgcctctcctaacagatgctcttttgctggatattttagtagttcagccactgggagaatctttgcagccaggatggcctcacagccataggctctatttttaacaattgccgacttctgcaaacctccattgctatcataggaccacatggactctggggcttccttcctgctctttatctccgttgccttcagtggctgtgcagtgcaaggttgacacaggcctgctgagcctggcccttgcccccctcagcctcacgcagacactcttccactggtggaagccttctgggaccctgcgtgcttccttctgcagttgcagctgccagcctgcactgtagctgcctggtcatttcctgtctcccctccagcaaggatttcgtgtttacagcacagtacctagcacatatcaggttcactcattcactcaaagagcgttagctgaggacctactatgtgcgaggcatcgttgtaggcacctggggtacacccgtgaacaaagcaggccagaaccaactgtcctcggggagctcacattctagcatggaagacaaacagcaaataatacacgtaataaataggtaatgatacagttaccaagtgagaagtgctctgggaaagcaaaccagatgtgagaaaatgggcatgctcagtaaacccacgttcaattgaatttcacgatggcatggccaagtgggcacacactgggaatcttcttgccccagacacgatatttgcactatgcacaatgattatgttgggtgaattttcctaaccaaaatttagtaatatcagatacatctcaatggatctgtaaagaacatattgggatgtaacacttcataccagtcagactagctaggtgtctcggtacttctcagtcttttattcccggcatgcagagaacatgtttatccagcgtacttagacaaatgcatgtggctgctgaagctgcaaagcccaagggctgagggtattactatcccacctgcctgaactcctttgaggcccctgggtggaaatcgtggggtggttatcaaacttgagcatagcctagaatcacctgggatggttaatatgcagactgtgggccaccctgagatcttgggggcatggggcaggaatctgctttgttcataactctcccagatgtttctgatgctggtggtccttggaccacactttgaggaacactgctatgcaaccttgtggaggtacatggagagccacacacttgtgttgttacatttgaaattgggagctatggagagaacaatgtgatcagtggtgctcaagcatgcatcagaatcacctgtagggccgtcaaaacgtgggttgctgggccttccccacagtgtcagggtgaggtctaggtatgtgcatttctgaacaggtccccaggtgacgctgaagctgttcgtccgtgggccacactttgagagccattgatgtgaatcattcaggacacttgtgtgccttggaagtttgggtttctatgagctagtttcacaaggacaaagttgggtgcatttttaggaagccagaacttaaccctgtttagtcagaaggcatcagaagagatagctttgagaaactaaatcagaataaatttcctctgatggaagcacagctctgcaatttatcttcacgtccaccctccagccagtggtgagctaataaatgtttaagcatctcttcttagggtcagcgggtacagggggctgatttattgcttgcctatctctgtggtgtaaatacttccaccatggtcagtttcaagctgccagtgtggtcaacgaacacggagctgggaagagatgtgcacggtgagctcccctcagcccccaggagccagctccggcgcaccactccctctggctgccgtaggggtttgtgacctttcagggcgttctccaccattcagtagttacagtcagtttccacattaaggaccatttacccctaagctgtggttgcagtcacaggacccttctctgaatacataaaccaaaatgattgcctctcccagccggtggcccgcagtacgtgtgaagcactggggtttagcctctaacttccgggcttggcccacggtccaggtggccaaggttatcttctgaggaaggttatctttcctcacacctcctctgtggtttcagttctccaggcctgtcagcaggagctgacgcacttcatacaccaaggtcaggggcctccgggtgcaacagaaggcttaatgtccaggcaaacccaagtgagttaaaccatcccatgctgaagaaattattttttgaggtgacccattttctcagacaagtgaatagaaaacattggagaaatgtttctttttcagaaaataaaaccacagagagacagagtgattcctcttgaggcagagcgggccgaggtccccttcggtcacaggagttcctttgaacatgggcgatgccctgggtaacacgggtaacctggtgcacatgaacaaagcccacgttcagccccgtctgtcccctcccaatctgctcacacctgctgcctgcctctttgctgtaacccaattctgcttcttctttcctaactttccttcgtctttccagatgcaggacgctatgggctatgagttaccctgggtgtattttgtcagtctggtcatctttggatcctttttcgttctaaatctggttctcggtgtgttgagcgggtaagctgaccgtttctatgtcctctccacaacgcagccgagcaaggtctcaggttccactccgtacatgcccggggtcctcagggatgggaccctgacaggcccaggaaaaccacaacaaagcctctgttcaaccacagattctgacccattggccaggcaggctgtttggcctctgatttgcacctagagggtccccggatcctggcgctgcgtgggtcagtgtctcgggagccggggaccggcactggccgtgctcggttgctgagtgtgcctcactaactatcattccgttcttccaggtcaatgatgccgtaggaagggactggccctggatctattttgttacactaatcatcatagggtcattttttgtacttaacttggttctcggtgtgcttagcgggtaagcaggaccaaggaaaaaggtcttgatttttccatttatttttatttattctttctgctattcctggctgtattctttttctggctctgatgaacctgggataaggggtcaccacaggagccttgaagtggatgtccttgtcctggctgggtaaagggtcagatgtgccactggtcttggtggtggacaatggaggagagctggcttcaccacaaaaagtgggtccagctggcccctcccagcctcaagtagctgtccaggcaggcagggcacttctccttgtgccttcgtggcctctggtgaacaggcctgggtaagaaaagactggtttaaaacataaacaaagacagactcaaaatctaattctcattttacttcatagactgagcagtctatctctgagtttccttttctgaatggaaaggacccttaactgtttaaagccatatattatttaagaatagaggagatgggatgcaatttcctctaactttatatctagttggctgcaagtatcacatctacctaatttcagcccttgctcagatgaagttagaagtggtagaagtaaccgggcatggtggtgcacacctgtagacccagcaactcagaaggctgagacaggaggatcacttgagcccaggagttcaaggctgcagtgagctatgatcgtgccactgcactgcagcctgggcaacatagcgagaccccatggtagaagtagcacgtggttggaaggaagcacctgaggatggccaccttttcaccatggaaacgcataggatatttcctcaacccactttcttcttcagaagtccacaccagccatgccaaggcctaacacctaaatgctcctggtgacctgctcatgggtaacccactctgctgcctttgccacttgggggaggggggtaatctacttctactctgcttgagactggtcagctgctttgcagagtcttccctaaatgtctagagaggttaatgctgggagaaatttaagcataaagacaaagattgctctccactttcccccagtacctaaactgggaatcgctactcccagctcctacagctgccctaatgcagttcagagcagtgggcttggccttcagagctgcgtagaggaaagaatctcctcccagctcttccacctcccatggagaatggcccagtagagaccttgatgacaaaatgccttttgctaaggtgaggccacacaggagactagtgccttccatcagggataacagtgatgagcagaacaacgtaagtccctgattcattgcctggaaggtagagaggttttcagttttatgttcaaacacaagaaaatgcccatgtgtttatatgtgaatctctaaggaaaagattgaaaaaatcaacctcatcaccctgaatcaaagcagaaattgaggcatcccagctctgcccttgctgggtacataatgttgggtggtttcacctttttaaatcttagtttccccatctgaaaaagtgaagctgataattccagtgcataggtggctgtgatgatagaataagatcattttcagaatacttaacacagtggtatataataagtgcccaataatggtgctatcattacaatgattattatttacttggtgcctgttataactagaagtatagaatcatcaaatattagacatgctccagcctttcctcttaaagatgaggagcgtgagcccagagatgttaagtgatttgtacaacgtcacttccctggtaagtagcagaaccagagccagccctcaaggcaccgcctcccatgagatctatgatgaatgagcttgaactgcaacacaagccacagctcaagacttttaaaagaatgtaactccactttcttcccctggagactgggaaccaaatctgagcaagtaaccccccaccaagagcctgaagtggagaatgagggctgggccctgagggtcctccctgagcagagcgtctgcccaggaatcaaagcagtgaagtcaagtgacagaaactgctgatgttggggaagaagccactttgaaggccatatcttggctgactcagcctaaaagcgctagggtgtatttagacccctcaccccaaacctggagcttagtaatattcaaaaatgttggttgactcagaacaagaacattaaggctatctgacctctgaacttaggagtctttgagtcgatacgctggtctttcctggagaccttcgccagcctctgtttcctgacctgttctgagagctgccgtctgctccttgcagctcctgaatcactgatagaacatctgccaaggcttccttggccaaaggtctgccctaaagagcaaagatgtgtgtatgggcgagcacctcccctttctggtttaaggaggcctctcctcatgtgtcaagggctggccactctgaattggttgcccccgccccatgcagtgccaaagctggaatcagcttctgttggctgaccactcagaggcaacggtttccagtcagtgtcttgattagccaggaccgtagaatagtcacacacttactgggtgcagatgtagttgaccatgcagtcaaacacccacttattcatcagacttctgattaagctacacttccagaagcattcaaaaaggtctcactgctccatgaaattgactgtcacattaacagtcactagcattctctgtgtcaggctccgtgctcggcgtgttcgctagattcgctcagttaatgctcatggcaactcagtgagctggtgctattcctgtgtccattctacagagaaggcaagtgaagctcaccaggcaaaatgacctcaatcccagcaggtgagaaatgcaggatgcagagctgagcccaagcgatgtgaatccatcacttctatccctgacctctgtggtgtactctccccaaacccataggacgggttcatcccatgcttttaaatgacaggcgagaaatggagaggggaagagcagaagctgcagtaggaagggtgagaggagcgagcaggcaggcacagaagcaatcagcacagactgcgggaaacagccagcaggcacacagaatcccagcaggaagctgcgaaggcaaccgcccagaggcctgcagcagggctgggctgcttagcagagggaccggcagccctgcagatcttcatggcccttgaaagagagcaaagccactaactgaatagcactgcagtcttggagccttctgggactgggagaagtgggtgtgaaaccctgcattccaacaattaaggataatatgattttatagccctgcacagtaactcatcctcataaattatgtccttcagtcactaaggaaagattgaacggtgcttggtgtgttgtgcttgtgaaggtagagaagatgactccataaagcttccatttaaagtgtggaaattcagggctgcgcatggtggctcatgcctataatcccagtgttgggagactgaagcaagagaatcatgcgaagctaggagtttgagatcagcctgggcgacatagtgagaccctttctctacaaagaaaatattttttaattagctgggcttggtggcagcacctatagtcccaggtattcgggaagccgaggtgggaggatcacttgagtccaggagtttgaggctgcagtgagccatagtcatgccactgcactccagcctgggtgacagagcgagactctgtctctaaaagtaaaaaagaaaaaatttttaatggaaattcaaagacttttggccctgagagggttagacctcttctatctggatcatgcacacatccagaacacctatttctgatgaggccagataaagtcaatataaagaatagatattaaaggattttttcaaaatactttattatctgatggtcctcacattaaccctatgcaagacataggactggtgctcttatggataataatcagattatgattacttcccctcagaaagctcaatctccagtcgactagaataaagacaacggtgatgatgacattcttgaaattgcacttgaagctgtaatgaggtggaagcctctggactctggttgctttttgttttaagcgactgcaaacagagggcttgggaagtgcgcctccagttggcaagaggcccacgatttcttacataggtagtcatcccatcccttttcccactgggagatgggcatgtcttgtccccaaaaagcagaggacccgggaggtaggcattttacagccaggaagtatcgctggaccatggcccacagttaagacacagtatctgggaccagaagaaagcaataaaaggtcaggacacacgtgccttgtgggtgggagcagaagagatggcccaacatacacagtcatgttatggaatgtaacccttacatgttatggaatgtaacccttattcatgacggttacattccataaagtcaccacaaacatgaagtagtggacactgagacgttggtcctgaggaactacagagttgtttcctgtgagcctctgcccacattttgtcaaccaatcaatacataaccttgttttaagtgtgtttctatttaaagacaccttatttaatatatatgattgattcatgaacattaaactcctggccactagcaccgtaactcgcacctgcgtgaagcttatttaatgcacgtgttttctctgtgcagcacatcatagccctcctacgcatagtgacacaggacggcacttcagcattatgcttggggccattttaaacagcaaaatcaccaacaaaaagcacaaaaatgagaaaacatggcactaagtggacggtgaaaaggacacctcacagtatgagagctgaattgggaaggcagaactctacatgccccttgtttggcctcagcgggaacatgtagagtttttgtcatctgcacatgtccacagatgactgaaagtgccacgagtattgattctggagttacaaacacattttagtgagtaggcgcatttgtagatgtgggatccacaaataaggagcctgggtggtatcgatgatcaaagggcctagcacacctcaggctattggttggattccacacacaccgccctgtgcatgcttcacatcgctgagccctggcccctggctctccacaccacccctcatttttcatgttggccattgctggcgagagatgcagtcctgtctcgtgacaaatcccacagctgtgactgattgtcttgccggcttcagtccctgggcccagtgcagactgtcaggctggggctccatgtcttcattagctcagtccccagagcaggaacatggctggcatccaggcaaggagataaagagagccaggcactgccaccagcagatcctttaccgtgggaaaccttggctcatcttccatccagcctcaagcctgtctgtgcctcatactccatgggatccagccatgctccagatctgactaaagcccttctccatccctctcacactcccaaaacacatccttcctctatgaggaaaattatcttcaagccaggcagaatcaccagcatacctcgtgttctgtttctccccctgtaatgtttattttagatccccagaggccttggggtatagatggtgagcttcattccatgggactgttgctgtaaaacaggattgggccaattgtccctattccagttgagtcccagtcctattctcccaattccaaaagaaggatgggaaggtgttttgtaaccagaacttgaaccctctgcaaagtcactcaaaagagctgaagtgagcccttacaagggactgtgaagttcagccccttgcaactccaaacccaccccagaggggtgcaaatggaggtagacagaaagacagtcaagagaggaggccttgaaacatagtttttggagttgatttgcatagggagaaaaatgctatatgaggttactgtctccaggagcaagactaaggccccgaaggcttaaccaggtacaggggataagaggttaggaggagaggggatggcatctctctatgatcatccccagaagggaaggagcaaagtttccctcgccattgtgagctgtcaatctgtcccttttccctagcataaaagtccttgggaaaaaaatgaaggtacccactggttggcaggaagcccaagaaacagcaagtacaatccaattagaattggattcaatcaaatttaagaagaaaattcaatccaaaccagagcatcattaaggcagcagttgaagagaactggttagcttgacagcccccacattctcccaattaaaaagttccctaggccccaccccagccccaactccatctcaccataaagacggtgcatgctgaaattagtgctctcccaagtggcacaggccaaatgcaagcactaggcagtgcaggtagtgatggagctgccccacatgacagtagactcagaagcagagccctttgccctcttatggtttgtggtgctgtccctccttccatggtgcctttcctagagtgtggcttcagcaaaaaattctccaaggtgcttccagcagcctcgtgccctgaactgggccttcatgggtgagagaggaagacatcatggctccaagaattaaccaagatgtcctatgcatgtacacacacacacacacacacaaatacacacatacatgcaccaccaagggcctcattccccaaagactgcatatcaaaaccaaaaatactcccctatgcctattttgcaagaaaaggcacagacttgctttgagggttgagaattcactttgttgatgattgccttctcctgccagcctcctccttgctcagaaagtgaattcgaagtcagagagaaaattaggacagaatcatagaaaagaaatagttattgtgtcagaaatttttcaataggccattcttccagcaaatcccaccccagtttcaatttctactcattattactttaaatcaaatgcatcatttaacttttatatcatcttgattttatgtatttttctattctgattggatttctttaaaccaaaagggcagcccccaggacattttcttgtgtttggaatcttcatttgtcttcatgtgggagagaaccttctctagattagaaatccttccaggaatgctgagtggcaggttgagctcgtcataagaatagagattgaggacattaaatctcctgggtcccaaatcagtggtatactggtaaatatttaacaattggctctctatggggaaagccctggttttcagcatttgccagttaccatggtgtaaatattcccactgtggccgatctcaagctaccagcgagacatccctgaagccagagttgggaagagacatgaatgattggctctcaggacctggggcgagtgagtgggctttggtacactgccggtcctaaaaccttgtgtcacctggagacccttgggagaattttaaactaccactcaatactgggtgggatggaaatgcatgttctggaatggtggtggaggtttttagttactgcttggaacgagttcccaggtcttcggagaacagttattaaaaagcaaagcctgtgatcatgatccaggaaaagagggagatggacttcatccatccccttaagcctctcctggccagtgtcaggaatgtccccttactgacgcttcccatcgaggtgatagtagacctaacctaggctgactagcggagctgtctgtggaaagtaggggcgtgtgggcaggtttctccctgcaaagcaattaagactcttgtttctccttatctccatctctccttccatcctcgacccttctcggtgctccctccttctctgtgctctcctgccctgcccctcctctcactctcaccagagagttttccaaagagagggagaaggccaaggcccggggagatttccagaagctgcgggagaagcagcagctagaagaggatctcaaaggctacctggattggatcactcaggccgaagacatcgatcctgagaatgaggacgaaggcatggatgaggagaagccccgaaacagtgagcagccgtcttcttctgtgtttgggctgggttctgggggagaggagacagcatcggggtcagcacagaactttgaccgccaccctttcttagaagcccacggggtgccttcctggagcagcagttatctcactgatggcagtcacttgctgcacacagacatcggtcacatgtgggaaatcatagctgtcgatctagaaaacctcatgctccttttagaatatttcaccttgaaagactgttgagattttgctaaggcagaggcttttttaaaatcagagatccttctcctccaggttccacctctttgggcaggggcacaggcttcccgtttgaaagcgcaggcttgtttaaaaggaacaatgtgtgccaagcagctgcctggaaaactttatacctgctcaggattccttccccctttgcagatttccatgcaccactgagctttctcataggaaaggtagtgaaaggttttccttaagggggttagattcaaagacctggggaagtgctaagtgggagtgttgggggaagcccagaggaattcggcagaatgcaattaggtgatggaagttgagccaattcccttccttgggggttcacgtggccccttgttggataggctgtggctgagatagaaatgaaagtgatggatgacattgactcacaaatacgtaaaaaatgacggatcatgaaaattcaggctcttaccagactagctccatggttctcaaagcatggccgctgaccagcagcgtcagcattacctggaaacttgttagaaatgcaaagtcttgggccccactccagatctattgacccagaaactgtgggaatggggcccaggaatctctgttttgacaactcccccaggtgatcaagatgcatagtaaatttgagaagctttgggttaactctaaccactctctatatctcatttggccttgatctctgtgactcgaatcatactctttctttctttttctgtgtgtgatatctttctctttcactatacatgtttgaataggtgcatttttgtcctctcaagcagccttacttaaaaacagtttcctaaacactgagcatctagagtactccacgaagcaaacaggttaaagagccatccagggcatttgctgcgtggagtcatgctggtaaagacagggaactggaacttcaccctgagcagagaggatgatgagaagagctgccaggagcagaaacaggtgcaggaagaaaggacgaagatagccaaagatgttcacgggagcagaatctctgctccctcatttcaaagatagctttaataaatctatcaactgctccctttctgataacgctgctcaaggagcaaatacaaaattaaagcacacaaacaacaagggactgttaacaacataatgtagtaacctaaggaggcctttgtgctccattaagtggttttgcaagttggaatacagggcctttgatggattataacaatgagggtcttcctggaaaaatgcctgacaccttctattacactgttgatggaactgaggagtagttgattagtttgtggcactgagtggtatggtaaataaataagttggcctgtgagccacggagaagcctacctctaaaatgcaggaatttgtatgctggctcctggctccaccctaagtcagagcactggtgctaccttgtgactgacggtgatgagcatttctgtagcgcgtgttattgaaaacctgcagtagccactacacgcttagcagccagtggttatccaccgagataacagaacgttgctattctgttctccgcctaaaacaggagcttccaagggagagtgtgctgcttctccatctaacccattaaatgaataaattgttaggagagttcccagcatggagtattatttgctgctggagcagatcacactgacaaggcccatctacccaaatttcttgacaaactttgagaagagcataatgagctgcctaacccaatagacagtctcgctaagattttcctaagcctagataaggatggccttagactctggagactggtttctctcaccttgcactgcttccttacggctggaggagccctgggggtctgtttcttgtcctaagaggactggagtgggagcctggctccttcattagtggaaatgctaattagtgggacagttccaggggatgaggcaggggaatgaatattttaaaaagcaagatgtagagagtaagatagacacatgcaatgaagtggaacgtgagagacaggagtggagctgggaagagactgtgtctgttggggaagtccaattaaaagtagaattgatgtgatgaaatgattaaggaatcagaggcctaattcacttgcaaaaaaggtaagacagtggctcagaaactatcttcctgtcttgagaatttcatagattgctctttgaaacaaatacaaggggagaaatcctgctacgtttgaagcatgtgtgtttcaattaccgtaatatcttagcctttgaaatttctaaaagactatagtatggtatgtttgccaattctcttcagctcaaaagccaagtcatcttttaagagaaaaggccgatcactcttcatcagcagctgtggtgactccgcttctcccctgggcagcatctggatgcccgtggtgtgaggctggggaggtggggctgagtgcagtgcaggagctgcttggtgacacccagcatatcttaggggagcccagggattctgtttccttagggaaagctgcaaaagccaccaaggagtagaaaaaatgggctggaaggacaacagaaagaaagcgtgcagttggggacatttctctaaatattagtgtaagtgaagtggcccgtaagttatatacaaaaatatgttccagttcattcattcattagtccacccatccacacatgaaaggtctgctctctgccaggcactgccatagacactggtgatagagcagtgaacaagggagtcaaaagtccctgccctcgtggaacttagattctagtagagagacaggtggtaaattaaatagcatgccagagaggggggaagcagtgaagggggaagagtgttgagaggttgtgattttaaggggtcagccaaggaatgtctcacgatcgaggcagcattggaataaagacgtggaggctggaaggaaaagcaccatgcagatagttgggaaaggagccttctagaggctagcgagaaggggccaatgagaaggggccacgctgatgaatccggagctgaggaggcttgtgcagctggagaggagggagtaagggggtgaatggtgtaaggtgaggctgtgggacccaaggagtagggtatataaactattgtgagaacttggctcttactgggagtgaaccaaagagcctctgggtatttaattgctattgagcagagaagcaacacgatctgacagacacttatcaggatccgtctgcctgccatgtgcagaatggaatgaaggtgggccagggagaggcaggggtcccgtcaggtgcctgctgcctcaggagatgctgggcctggtcttgacacccatggaagtgataaggtcagacttcaggatgatgtcatttgcagacgcgtcagatatgggatgtgagagagagaggtagggcattttccaaggcaattgtcctaaacgatggcaagaggggaattgtcatttatggatatggggaagtctgtgagaggaacgggtgtcagggcaggaggatcaggaaagccatctgagacctttaagtttgaagtgcctattaaacatccaggtggagatgttgagtatgtaataaggaatgaacctctccaggagagagatctgtggctgaactgtaatttgggaagtcaacaacatatagaagatacttaacccctggatctctggataagatcactggggtgtgagtgtagacagaagtgagatgctgtccaagaactgagtcctagccctactgatgtttggagattgggatacagggaaagaaccagcaaacaggactcctaaaggcatggccagagagacaggagggaatgcaaaggaaggggtgtgagcgttgctgctgtgactggaaactgaccattgggcttagcaatgtggggctcacttgctggtgccttaacacaggctgttggatgaaatgctggggagaaagcttcctggcaaatcagccttaccctgtgcatctctcgagtctgcatgcctcctgcaatggcatggagcgttgctctgcaggcttcttgcttctttggcatggcccagcttccagccatctgaagagtctggccatcaggaaaccagaaagaggagaggaggagactcacacagactctagcatgcccatggcctcaagacagtcagtgtctaaagcttagcccatcacgatgttcccttctacagcaatgccaatactagccactgcctctgcaatgggttacagtcttggaaaaaagaggacgtgatactcaagagccatttcagagccaaaaaggcaaaaaaggggcaagaaaggggcatgtttatgtactgttgccctggatgtggcttcctaagtggggcagccaagagccaagccccttttctctctgggtaaagactaggataatgttgaggtctccccactctagtgactgcttctcccctccctctgagcagcagtgagaagcccctgtgaagggacccattgcagaactgtcattagtgcagggttattgtcatcagcagagatgcactgctcaaagggacagggctcatcttccagctccgacgttaaatctaatagaaggtcagacactacagggagaagccataaagaaaaagagacagattctcttctttttcctcttcaagatgaaaaaacacatctattaaatatccatccttacaggaatctctctttcatgtcattaagacaacttaaatgcaccctggctctctaaagcttgcagttcaatacagacattgatgtggatgagcacgtaaacagacagacagacagtggaaccaaaatattgaatttccatgcagataagcaggattaaatatttaccccatggtatcgagttatgtgactcgggagccacttttgcagtcatcaccagctagcagagccacgtgcctgctgcctgcccaacagagtctaggatcacatattactgagacaggaaattggaaggcttgtaagagctgcaggttgcccacgatagggccccatgtggcttgagagcagtaacctgaatatcgctgatttacattattttatatgtgtcaagggcatgtacatagttatttgatctttaaaaaaaaatcagggccgggcgtggtggctcacgcctgtaatcccaacactttgggaggccgaggcgggtggatcatgaggtcaggagattgagaccatcctggctaacacagtgaaaccccgtctctactaaaaatacaaaaaattagccaggagcggtggcgggctcctgtagtcccagctacttgagaggctgaggcaggagaatggcgtgaacccaggaggcggagcttgcagtgagccgagatcgcgccactgcactccagcctgggcgacagagccagacgctgtctcaaaaaaaaaaaaaaaaatcagtacgatcagtatttatctagatctctcgatacctacaacacaatcccatgtcatggcacatacgagtcacacaaacacatgtgaagcatctggctcagattacatgagaagacatgccaatatttgtttttgtccttgattctgttcataccttgcactgttgagtgatcatgctgccaggccatgaagtgagagcagatccttaaggcagagcctggaagtagctcctgggccttcacgttaactcttagctggtcctaatcagagccctggaaactttagtgctggaaagttgctggagagatcaggtgaggaaactggagcccaaggtgggaaacagccacctgcctaaatgttactgaagtcagcactcaaacccagggctccagattccccatgcaggaccctgcccagcagaccacagtgctccttacagaaggcttcttggatacccaggcagcagcactccctaactgtccctctgtccccctagctcttggggcacatccccatttatcttgtggaattacatccacctctttacacttgcttgctgggctacactgagaggtccttcttggggctgcctttaattcaccgttgtgtccccatgacctgacacaggccagagcatgggaatgtcatggcacatatgagtcacacgaacacacgcaaacgcgagtgcatgccatatgccagttttggcaaagcaccttctgccatgctctaagctgttggaacaggtgagctcacactgcccctggactgagttggctcattgttctgtctgctcagaattgacttccttgtggcatcaccgatgacatcctttcaaagtcatttcctttcatgaacacggttgctttccaatagccctcagtcactctcaactcttggaaggcaccatttggaaacaggcgaataagcacagagccccccatacgtgtggacagtggcgatgacagggaaattgaagtgccgtgggaaagcattgggagttcttaagcaacgagattttgctgttccctgaagaccatggtggctagtggggctgtgtactggggctctgcagtgaaaccactgatggatatttctggttctggtagtcatgaatacccatgggcgaggtcctgtggacttggtgttgtgagaggcatctcacccaaagcggggcgtgggggccatgttgtagtaaggatccagaaggggtctgttcattggtagcacattacctttggagcacagcctggctgctgtgctatctggccccgtaagtgtacaaatgccattttcccagccaggggagcagtggaagagctatggaaaggctgtattgtgtatacagtgcgaagtaggcacgtcagcctgtttcagtgagctgtcggacacttcccaaagcaaaaccaccagctctgggcaaggcttgctaggttaagctgttgggaagccatgacagtcttctcattgcccaatggccgtgtgcttcagaggagggaagccgtgacagtcttctcattgaccaatggccgtgtgcttcagaggagggaagccatgacagtcttctcattgaccaatggccgtgtgcttcagaggagggaagccatgacagtcttctcattgcccaatggccgtgtgcttcagaggagggaagccatgacagtcttctcattgcccaatggccgtgtgcttcagaggagggaagccatgacagtcttctcattgcccaatggccgtgtgcttcagaggagggaagccatgacagtcttctcattgcccaatggccgtgtgcttcagaggagggaagccatgacagtcttctcattgcacaatggccgtgtgcttcagaggagggaagccatgacagtcttctcattgcccaatggccgtgtgcttcagaggagggaagccatgacagtcttctcattgcccaatggccgtgtgcttcagaggagggaagccatgacagtcttctcattgcccaatggccgtgtgcttcagaggagggaagccatgacagtcttctcattgaccaatggccgtgtgcttcagaggagggaagccatgacagtcttctcattgaccaatggccgtgtgcttcataggagggaagccatgacagtcttctcattgaccaatggccgtgtgcttcataggagggaagccatgacagtcttctcattgcccaatggccgtgtgcttcagaggagggaagccatgacagtcttctcattgaccaatggccgtgtgcttcagaggagtgggaaggtgacagccacataacattttgacaggagacattcatagcttcctgggcctggcattagatcagcataaaggtgcctggcagctctgccaagccatcagctaataaaggctctgctccccttggggagacgcctacttgactttaggggagtgtccaggccaaaacgataaccttgataagccaacaaactccagaatccagatggctaggtttatggtggagaatattgtcaataccagctgagaaagacaccagaagaaggattcccacaccctttttagatacctgcctttgtattggtctacctttcactgtgtaacagctatggtaggaacagaggctgtgtggaggggcctatgagcagcaggggctgggtcgggtgttgtggaggccacactgtggttttggagggacaagagttaccagggagccaccgggacctctcctgcagtttaaagtggatgtggatagagagcagctgtgttcctgggatcgctggctagccagccaccctgcaggggcagagcaaacaggctgttagctcttgaactgccaggcacactgggggtccttggcagggtgtggagcatgaaggccctcttcctctccagggcctggaggacagcatcctctgcctgcccgccagggtcccagcccaaaccagcatcttccgagcccacttctctctccagaggcttcttcatcttcccagttccccaggatacaaagccgccttcctctttcctctcctgtgcccttccacagttatcagtgcctgcgttcagtcagtcaagtcgtatgggctgtcctcttcgcttcttcgcttggacttctcactccttccctcctctcccctcacctctctccgcctggactcgcagccaccttgctgccctgccttccagccccgttcccacgcaacctgtgtaatgcagccaagttcatatttctgcagccgactgtgtcactcccttgttcaaaagctttgaatgtgtctccatgggtacagaataaagcctgaacatctctcagtatttcaggcatctccaacctgtcccagccaatagcttgaaccttatcactccctactgccctgccgcaaagccagactgcatcttgttttccagaaacgcctgctgctgtcctgtttctgcacctttacccatctcccatccctctgcctacagcacctgtttcctcccctgctcctccgtggcctcctagcccaggtcgaagagcacgtcttggctcaggcctcccagagcccccatctcaggacaggcactgtcagcactcaaccctcacctacccaccagtcggtgggggtggcccagccgtcttgttatatagaaagctcttgggaggcagcagcgtgcattggtaacttcttattcactctcccactcagtatgtagggcaatgatttctatttcacagacttcccccaaaaacacataatgaattgaattgaattctcttcggatcagagaattaaggtctgatagccctatattcatacctagttggccaaataccatttttccagtcttagccatgctcatggtagcccccagagagtgtattgtggttgacagaatgggcagaaatgatttggcgttgagaaagtgggccgagaggaaagtttggaaggagttagaattatatagtcccaggagaagagaaagccgggagtcgacagaacagggacaaagctgcctcatgcccacatactccccgtaggaggggtcattgtttcactgtatggcgtcaacttttagattctgagtttggatcatggatacatttcagccctctggggctctcctgggctggggggcagaggaaggacaggggcagaggcatgagaggggatgtctttttcttgcatggaaggtgaagaaggcctggatggtctcctttcatcttgcccaagatcatctcacatgggtattgtttgccccattttgcagatgggaaaagtgaggctcggaaaagttaacgtattcacattgttcagcttgtaagttgcacagttatgtggccgttgctccctccgtaccatgctggtctctaccacaagccccctcacgaatgcccttctcttccaaccaggggaaccagaagtgggccctccagtcccccagccggaacagcctgtgaattttccttggttgttgcatttatcgcttcagcctaatatgcaaagcaggtggacggagaaaggaggaaaagagcggagatggggcgggagggcgggggcggtggtgctggtagtagggcatgggtttgatttttttttaagttgaactttatgattctgagaactctgtttgaagcatggaaagaagttatggcattatcttgctcacggaaagaaaaagcgaactgaggtcaagcgccatccctttggaatggtttaagaggcagttttgtttggaaggagatgtgtcaattccgtgacctatccgatttccttcagttcagggttccttgggactggcttagaggagggtgttgatcagccacaatgctctggggatgggagttctagcttaccactttcctgccttggcaagtacggtgtgaggaatgtcatggaaccgcctctgatgattctgggctgtgcagtgctacagcgtcatcacttctgagtctctgatcccaggaacctcagcactatggggccccgggggggatcactgacacgtggtgtctttggagaagtcctgtcacctacctaaagccacgggtcgctttaagaatggatctgcctgtgtccacttggccttgcccagagtaggcactcagtaaagagctgatttgactttaatttggtgctttgcaaatcgatctatacacttgggcgttaaagtagctcagcagagggatggaaggggagatgaatcatcctgagtttccctttgatccattttctccaataaccagtgctcagccccgaaacagagctgcctacactacagttacccttgcctccctcacccactccacgcttccttctctgtaaacagtgggggtaagaagctcatgccgcatcaagatatcttaactgtcagaggctatcagtggaggggagagtgacagctccagcctttctcactacttgctgatgtggaaaattatcatccagtaatggagggagattagccacgtattgtatttccatcgtcgggtgcatggcatgggaggatgatttatagaactggaaccctgaagctagtggaaaggtcacagaaagtggaatcattggcctcaacacagtggctagtgtctgagggaacctcctagagccacatgcatgccaggccatcctgagtgcttgagagagacatgggcacattaacacacatttaagtcccaacagggcacccagaatactaagataaatagacaccgtctctgtcctaaggggaattacagcctagttcaggagacagatgcaccaacagacaggtgacagtgatgaattgcagtcatgaaccaggggctggagaaacacagaagacagagagcagagtttggaagagggtgggagggactgcctgccccaagaaggattcatgaaggtgccatgtcagtcagggttggtggaccattgtaataagcagcccccaaatgaaatctcagttgcttagtacagtaaaggttacttttcaccccacggtggagtgtgagctggggatgggagggaggagagttccaccacaccggtcttcaggccccaaggctgcaccccttttgtggctttgccacccccggggcctcacagtctcccctgtctgctctgcatcgggccagcagaagagggagcagagggcctgctggaggcttcagcagccaggcctgggagtgtgggcattgctcgcgacacaccatcggccggaacacagctcccacttccgcctgacttccaggggactggcgaagagcagctaactaagtgctcgggggcagaaggactggggctgggtgggcacaggacagtgttcctgctgcagtttggcagcaggtcacacggccaaaagatcgcaaccggaccttctaagctgagggggctacatttgcaaagttgtagaagcaaaataatttttaaaagaaggaaaggaaatggaattgcacatgtttcatggtgatttgagttcagggtgcacaggggagaagccaaaaagaaagatcaggacagaaagactgggacctggtcccaaagggcctcggagtgggactctatcctgtggttaaggaggagccaccgaagagatttaagcagagggatgacaaggtaccagtttaccatcgaaaggtcactgtgcagccgagtgtggacaatgggctggaaggagagagaagctggaggcggagtgggggtcagtcagaggctgataaggcctgagtgggagtggacaggcggggaaggattggaaagagcctgcatccactgggatagggtcctaagggctggcaggccctgaacacctatcctggaggctccaggataaacaccttgtgcttttcagcctcaggaatgatggaggaggttgtgcagtgccatgcccctctgaggggctcttcctgggagttggtttgtcctgcctgctccttggtgggatccctgccatgaccctctgccccttggcattccaaggcctgtttaatacccatgaccataaacacacccacaagcagtccccttaccctaaaaggtgccacatggagaattccaagcaactcagcctattaaatccttgcctgcatgattaaatgcctcctggggaaaaagtcgagtaacaaccccaaacataggctttgatggctccatccttcaggattacttcaccaaatggaaatactcatgcctctggtgacagctgcagtgtttccagaagagatttctaccctcatataataggagagactttgtcctcttaaataactatgatacctgctgtaagtactgaactgttaatcaccgtgatcactttgtgtcgatgccacactgctagagggacagaactgaagccttgccagaaacaacagagaatctgctcaaagagttgcctaatgaaaagggtggtctgttggggagatagatggaattcttcaaaatagaaggcaattggcagcgttaggctggggtgagggtcaggagaagaggggcagctggggagagaagggctggctcatttatgtcttactttctttctatatcctggtaccaggtgctggattccttatttagccatgtggttagctccatcgccatccaaaaattacggaattctaaaaccctggggcataaagggggctccaggtccctgagtctgtcctcattccctgggcttaatcatgcatcccccgaaccacaccctaccccatgtgggggctgttggcccaaagacaagtgtctgtgctgctattccagggccttgtcacatcacactggagtgaccacctcccagctgacagtgctcccggattccgtttcttttagagatatgagcaggtttcaacactgtctctggaaaaatcacaggacatgctcaaaggtagcatcatgggaacagggcaagggccttccacaacagaacaggaagttgtattcatttccaaacacctggctttgagccgaaacttgcactttactgataaggccataaactctcctcctcctgcacccagtttgattcaccagcagggcccacacatgtggtgccatccagagtcatccctcctcaaaggaaatgatgggcaagaaacgtgtttgcacaagagtctctaaacacagcccatgaatgaatggtctccggtgaaggtagactggagtgatagagtagcatgttcacttctacatggcgctgcagagagcctaagaagagaatgaataaagaaaagtgtagccatttactcagtcataaaaatacacgtccattgcaatttagaattaatacagattagttcctccgactgaagaaaagtaaccccagcaaagatctgcagggccgagccactggacagaagagctttgataagagaaatttaaaggtttatgctttctaaatagatacatttgaattttgataaaagagaaatttaaaggtttatcctttctgaatatatatatttgaattttgataaagttattcagtgttttgttttattctacaagaaagtaaggatattaagacattttaaaaatgtctgggcagaggagcccttgctgttccctaaatcatgttctaaaaccttatttgctaagcctgagtctggttttgactaacatggcccaagtcttactctaagaacttcaatagtgccttgtgtgcaggatcacagtgtataaagattagaggtcaagcgaagacaaaccgcaggccagcactgttaaagaatgattacaactgtgctgggacttgtttgtgtcttttgcttgaagtaatagactagatctactctcaacaacttactgatgaagttgaaaagccttaattatttgcttgacaggctagctttaaaggaaaaagcctttgtttaccttctcaatttcaagcttcaaatcagcctgtccaaccattgtatctcatgtccatgactcatgagatatgataatggtgtccactgtcagttattatgttaacaaaattatctgaaaataaccaaatgcacacctactaacacatgcacacacaccaaacacaggagcaagaagaaattaaggactcctttcttgtcaggaatattcagaattagagtctcaatgaatttactaatattcgctaaggtcagctgggtccagctttgagtaaaaagcttggcatgatgcttgctatgcctggcagaggcagagaaaaagatccctgctgtccccacaggggagagcatctgcttgacatgaaaaagtaatgtcagtggtgggtcccagccccttggaccacttctgcattgactaggaagctaaggggtcagttgctaaccatcaggccgagcatcctaggttttcatcaagaagatcccaagcttcaataaaaactgcagagtttcttcttgtacctcttagatggtatacaatcatgtccatgaattataatttccataatcccttagtaaactaattctattaatctattaagtcctaccccttgattagatgagttgagaatacagcaatctgggatgaatgaccctcatgttcctctcccaacaggatgccagagtttttagtctgaacaattgtcgtgtgctatacaggaactaacaggagccagagaaaagcaggcagccagacttcacggccccacttgatagccagtctgcagttggcctctcccagtttccttgcttgtaaaatgacgggggttaggtcagtaaaagccccttccagctttggaatttgtttctgtagttctcagttgacacacgttagctttagctccaggagcctgggccaaacctgatcatttcagtccatcagaccccagaggaattcagttgattctagcttcttaagtcctcagactcctggaattgcacttttcctcctgcaggattgcctgcaccctgaaagccagcccgttcttccaacgatcctctgcacacttgtgcacaccctgatctctgcacggaaagcccagccccaccatctgccttccgaactgccatgttaccaggccaggcttgccctacccatcatgccatgtgccaatcacggagacacaagttttgcagcggagaaagcgtttgttcacaaggcagccaagcaaggagatggaagagcaggtctcagatccacttccccaaagatggggttttagggatatttatgggatagaggagcaaggtccaaggcatggggaaaggtgattgggggtaaggaaaagtgaggccgtcggttatctgcgcaagtatagtcaagcttcacagctcttcctgggattcaagttcacaaaatggcatcgttagcgtgatctgaggatggatgtttgggccctctgatgccaaaaggtcgcccattggacactcacgcaggcccagttggaggattagtggtctgagctagcttgaactggacaagagctgaccccaagctcttgaaaaatgacttaagcaaccattatcatggtgacttatacatcagagatgttatctgtaaggaggcttgtagaagtttagttacatattccttaactacatgacttttagctgcatatgttttaaaatcaactagaaaccagtgaggcaagttaggtttggtgacctcattaggttagcccttggtttcaccaccccaccttcaaagccccatcaaccatcccttccttttctgccttttctatcctcaccacctcttctccccagcagggtcttacccgctccttcatgctcccagaaaccccattccacagctgcatcatagtacttattgtatgtgatctgtagtgtctccctgtctgctgtattcattgcattttatctgtggcattcatctatctgataccgtctgctgggtagtacatcttgaatgtggggacttttgtattaccagaatcccatacagatcctggtgcataggcaatcaatgaatattggttggaaaagggtttggaaattgggggataaaagtagggtcttggcttggaagtccttggaattctgcctctgggaatggatcacttaggcctgctttgtcactttgtcagatctaaaacgaggttgggccagatctgatccagcagaggatatgtaattaaccaggcacataaattaatttttaatcttccattccttgcctgtcaacatttctttttcacttctcaaggaggacatgattatcccatgatgtttttcttcatgtactaatttctcctcctctttcttcttcaaacctgtccacggaagtgtcagaaatacttctcattttatcctttctcaggaaggccagctagccagctaagaatagcagtcaggaaatggttaagagaataccaagaataaattctgagttgcttctttacaactagaaagctgaatacatttaaggcttgaaaggtcaactcccttcaaagggggcagaggtttgatttcgtccattatgtggtcttcagcacaatgctcatttcattcactggctgcaatggagatttatggagtaaatgttatcacaagctgagacttaatgagaactcagctgtatctcctggatgtagtggaaagcaaccattttggtaataaatagagaacagcatctaatttgtaaattcctttttccgttgctaagtttaatcagatcagtgaaactgaagggaattgttgatgaccaaaaattattttccatgccttaatctggccaggaaacattactcctaatggaaatggcctgttgctctggcgatggaaggggatgacatttgtcattagactaacccaattgttgcatattgataaatatgtttaggccaaaatctatttaaaacccaatagaagctgaggccccatgttgccctggtactggtgttactggttcctagaagtaaaaactctttccagttaaactacagagatctgtagcagtggccatcctaaagatttcttcttgccctcagtgatcatccagagcaaggccagaaggaccatgatggagcccaaattgtggtcataagtgaccttttctgaatggcagagagtgggttcagagaacagaacacaatctctggcagggccttggcttactttagggttaaaacaaattcaagggggcacaaaagggagttgaatgcagctctcttttttccagcggtgcttcagtttttttcgtgatgaatcataaagatcatttccaggatagggaccatgccatgggtaagtgaccgttaacacgcagtaggaactttatgaatactgcatgacgagaatgacagcaatgaggaacacatctgagaagctgatggccccagagggaacacggctaactgtgacatctttagggggtggccctgagaatgctgtatcccttccagtaagagtaccgcctccaggcgacctttagacgcacagcaaggggtcccgaggacattcttctcttggcctgcacttgcttttatattcatgtgcttttgtatacatgcccagtgtccaggcatcctacacactcagagctctaatactgaatattaggaacgacagctactgctcatcaagcacctccttttgcccatattatctttgccctcacttcacattttcagatgagaaaagtgaggttcagatcattggcctgaggccagttcgctaacaggaggtttacccaggcttacacccaggcacgccccatctgactcgaaagccttccctctttctcttttgtcagagaggcaagcacatggtaaccccccagaatcatgagcctggtgataggagaagtggagtggaaagaagccctagaaagggagtatggagacctggttcctagtcccagctctgatactaactggccctgtaacctaaacaaccctttcctctctgggcctcaatttcctcataggtaaaagtaatacccaaaggatctctaattgtctgttaatctttctgcattccaatccccttgaagccccatccagccctgtctttctcttggagtttcacattccagaacaagtctgtggctaagctgaggagaggatgccctcattttgcaaagagacgcttctcccatcttggccaggcagcagaggtcacaagagaggaagtgtccactgcataaggactctggacagcttctctgccagcacgcatccagcagctgactctttcctcggggcccacgctctcctgcccttttcccagagccactaccctgacaatgtctgtctaccttgagagcactgaacagtagaacctcagtgccgggaggtgtcctgaggttctctccttctctcccgtcatccccacctatgtgtgaaactcctctacaacaccttcactacggagtctctccaccctgcttcttacacactctccgtgtaggaacttaccagtcacaaaaaacccttccatctttgtgcaagcctcagctgctggaaggtcttccagctgacacctgcagctattgagtgacagtggaaagacagtgtcctgggtgcagtggcatcctcccgatggtgtggtgaattatcctggcatggttaattactcacactaattgcttttctgtcactgcgctccctcctgcctcctatgtttccatgaggggttgtgcttttgagatcttttcccacctcttctccctttgtcctcccagtgactctgagggaagcgctgagctgctacaccatgttccttctcaaccaaggagccagcactgagcagagaggagctcttgcctcttgcctctggcccaggcaggcatcagggatctctctgtctctctctgtctgcctctctccctcccacccctcgacacagtccttccttcctctctgacatctgtgcttggtcactcccatctgcaagaaggcccgctcccccacagtattattgagatagtaacaggccactgtctcctctctgctttccccaaatcaggcacatcccaacttcaccatccaggtagttgttactcttgtaatgtaagcagcaaaagcgatagagcagcttgaagctgcccagggcccatgttctggctggacaggcccaccgatgcctgtgttcacacagcccacactgcccgacactcccactcctcaccccaagagccttcctgtgttccatccaccaggaccaggactccatccccaaatcagaacctctgtgtcctttccttccttccaggtttcctgggccactgagcctgcagcatgaatcctcctagaatttaagactcagaaggagacaggtcacggagaggtagcagtgtaccccaggcagtcgggcccaggtgagcccaaggtcaggcctcacatttcaagtcgatttcaggatcattaacattcccacttcctgtcatgcccccaggccttttgcttgttgaagacagtggtccctgttctctggatttcaaaaaccatttctctcttctgaaggaagaacaatcagcgtccccaacaagcccagctctcctgagaaattacagaatagttctaagattcgggcaaagagggaggagggatgaagggtgaagaaggcctttgattcagactcagccttgagaggaaggatctggagggagaggctgttcagtggaataatgagagtgacagaggcaggcgttcatccccgtctgttctttttgcacttttggtttggggtcggtttctccttcaatgtgcttggcttagagctgccccagctgctgtgggcatgaaaaccactgctcaccagtctccacatcttggcccttacccaaaataacccaggagggaggaaggagctcatgggtgggtggctggataaatggctccagaataatggatcaaacattgaatgagtgaaggagtacacaccccgtcccttggccccaagatgctcattcatacccctctctgagcgtgaaggagaaacagcaaaagctgaatttggggtgtgtgccccagtgccagccagtctttccagggtgcttccgatgcctccagtggaagtccccagccatgttccctccctggggcattcccatctgccctcccagggaaggctgcttggtgcagcagaggtgtgctctctgggagcttcggtggagaggaaaggacaggggagtcaggatacgagggctggtggagtctgccaggtggggctagggcagcctcgctcttccttgtcccaggagcacatgtcaaaagcgccagggctggggaagcagcagggagcagaggctggagaaggcctgcgtccctgtcccggttctgctctcggcagcctcagttttctcatctccacctgtggctggagacgccttccccagtagtctccccaggttgttgggagcatgaaatgaggtgctgtcatgtgagcgcttgaacagccacactgctggactctcctaatgaacgagcaaagaaccatatgtgtcagcacaccaagctacatggcacaaatagtaaatgcctcagggaaaaggaccattctgggatgccacgtaggtcaaggaggcttcatggagatggtcggagttggagggtaggtaggaaggcttttgtgcatgtgggggagtggtggggatggaattccaagagtggggcagcagggcaaagacccagacacaggcgcacagctcccagcaagcgccctggatgcattaagccctccatcagtggtgtcaaagcaagaggaaccgtgtgtggcatattctggaggcagagagtaggactgagtgcatggatcagagggcgaatgctggaaagggaaggtgtagttagatgggtagagtgaaagcggattgccaagggccctgggagccaggacaagggtcccgtgtgctgagtgatagtgatgtgacatggtgaagtccctgctgagaaagactcctccagaagatgagagaattacgtgtgggcttcaagcccctctctctctgtgccgagagtccccttacaaccaacaacttaactgtttcatccaatcaacccactcctttcttgtagagcttaatttttttttccaaggcaaagaaatcttagagatctcctctcaaccttcacctcccccacccctgcagcaaatgcttatccaggctttgcctggaaacttctactaatgagcaagtcctcatctctccagatagccaggccatttgggaaatgtttcatccattagggcacgatcttcccctgcagttctccttctttagtgcagtgccctctaaaactactctgggcaggtgctgtcttcctcctgtggaaaaaaacttcatatgttggaaggtggtggcgaggtctcttaggttctccttatctaaattaaacctttccattttttcttctactgttctctataagtgacacaacatgacttactggcccttccccatcaaagaactctattattgccccctttagacatgatcctgagcactgaacctctatcctaagggggcctgcctgatacatgggagagggaagccctgcctccctgggtctttgcctgtagcagtgagcctagaaatgcatgaagccgcaggacctctcacaaaagatgtgggcaattaaagcagctagagccgggcacggtggctcacgcctatcatcccagcactttgggaggccgaggcgggcagatcacgaggtcaggagattgagaccatcctggctaacacagtgaaaccccatccctactaaaaatacaaaaaattagccaggcatggtgctgggcgcctatagtcccagctacttgggaggctgaggcaggagaatgacatgaacctggggagtggagcttgcagtgagctgagatcgcaccactgcactccagcctggacaacagagtgaggccctgtctcaaaaaaagaaaaagaaaaagcagccagaggcccggcatggtggctcccgcctgcaatcccagcactttgggagggcgaggtgggatgatcgcttgatcccaggacttcaagaccagtctgggcaatgtagtgaaaccccatctctattaaaaaaaaaaaacaaaataattagctgggtgtggttgtgtgggcctgtaatcctagctacttgggaggctgaggcaggagggtcacttgaacccgggagttttaggctgctgcaagctgtgatcacaccagtgcactccagcctgggtgacagagcaagaccctgtctaaaaaaaaaaaaaaaaaaaaaaaaaaaaacctaaaactaaaacaacacataaagtagccagatggaccaaagactctgtctgccccagggcaagaaagaggaaaacaaactgcaagcatccagcaggcagagttgggagaagaattaaagcaaaggacacgctacatagcagggcaagctgatcgatattctgacagctgcccataaactcattcatgaaattatggggctgaagagacaccatggggttggagttaaaatgactcacttcacataaatgtcatcaatggcggcagcctagaaatttaaggcagcaatttacttgcctgctggaagggaagacacaaatgagacctgtctgaggaagtcttgctccatactcaaggcggctttccctctgtggctgttcacggccttcaaggtagtgctgggcccctgtagatcctccttgcaggaaatctgacctgctcttcagcagcagaaagcagtgaagcaggaaagacggggccccagagaagagagaaaatgagaacaaatcgtgagctctgcatagctttgtgaacggcaaagaacagggtgcaaacgtcaaaactcatccatagtaaaactctgacttccgtacaggagagggagcctggggcctgtgtccatccttgatacttttctgaccaagggtgggctcctggcctctccgtgatgtgcatcaatggtgagtgagaaagggaggcagcactgatggtggaaagaggttcaaaactctaccactatctgcctctgcgactctggacaagctgatgaccctctctggaccttaacattctcacctatacaatgaagggctaggtggggcacagtagctcatgcctgtaatcccaacattttggaaggctgaggtgggaagattgcttgaggccaggagttcgagaccaacctgggcaacatagtgagaccttgtctctacaaaaaatttaaaaattagccatgcatggtggtgcatgcctgtggtcccagctactctcaaggttgtggtgggaggatcacttgagactgggagctggaggctgcggtgagccaagatcatgtcactacactccagcctgggcaacagagtgaaactctgtttcagaaaaaataaaaataaaaaatcaaatgaagggctggcctacaatcctacagaccccttctgactgtgatgatgtcatgattaagatctccatttcacactggggaaaccgagccacagaagagtgaggtcacatagctccaagtggcagagccaggatccaaactcaggcccctggcccccaagcccatgctcctaaccacgctgcctgctgactgcttccttctgcccagaggagccggcagggaggccctgggcagggtcataaaataagtggcttctccccaggaccaccacctgcacccactgccctcctcctccacttagtgatgccagcacatcctcagggctctcttacccttgctctcccatgacagataggaaaaggctttataaattcatcaatagacattctagctaagaggatggacttggcatcagatctacccgggttcaaatcctgaatcttattggcgcttgcttggagtaaacgactgaattttctaagcctcaattttctcatccaaaaaatggggacatctaatgcctccctcatagggttacctcagttaatgtatgtaaaattcatggaagagtagctggcatatagtgagtgattgagagactgagctttgttgttaatatgaagatagaaatggctgatgttgctattgcacactctgggagacaaggccttaaaatcaaggaatggccattaggtgtcatggaaccgggttggaggaggattgggggtgcaaatcatactctatccctttccaatcataccacgtgggtgaccatctggcatgtggcacttagcacttaaaaggacaccactaatgtccttttagtagtgagaactgggtttccaaaggagtgctctagagaaagaccaccacactccatgtctagaagatccctgtcccatccctaatggttgcaggcaagctgtgttttccccttggagtgtctcgccctcctgtgtggtcagatagcctgttttccccatagtccccgagggtctgagcatgtcccaggctgccctgccatctctagtgaaggtggggtgggggtgggagagggagtgtgccaaagttcaagagtttgttgggtgcagctaaacttactgcccctgccccctcccggccccatccacctccccgccaacccggcagcaataaccaaggcagcctgatagactccgtggtgccctaatggtggagagagattttctgcttgggagcacaggatgtttatggcctgctgagatcacagtaaccctggctttcttctttggattatggctgcagatcaagggcaggcatttatgcctcctcccagtttatagcagtgatcataattatggtgatggcagagcgcacttctattgtgcctttttaataaggccactttgtttggcttcttaatatttaatcctgttttatatttactttctgatggcttaaaatcaaccaggctttaattgcttatgcagaggaagccaagctgggcctgggctggcaggaagttgttgagaaggttctggaagctgatggcacctttctctgtgacctttccacccaggcaggctgctgtggcctgggaactgtgtttctttttctcttctctttttctctcatccactctttcctcttattctacaaccttcttttctcttttgccattcctttcctttcttttccttagaagagatcctcagttcaccctccggttcaatttatccatgtaagagaccagagttgtactgtgacctgccaaagctttggagctacttagggcaaggccaaggcgaggactgtctttgttgtttttcctggactcacagtattagagactcctaagactccaaactgggcaaacacatatgaagagttccttcatctatccacttgacaatacatatggccacgtgcttgatctatccaacggtagaaaagtcataaggaataactttccaagttattgttttctgaaagagaaaattaaatcagatgaaacatgccgtgccacagttcctcaattcctgggaagtaacacagcccagttgctcaggtctattctgcggtggggctggagcaaccctgctacaggcccctgcaccaccagctctcagcagcagtccagcctgcaaatgtgcatttcagcgacgtcgcctgatggggctgaaaaaggcctggactcaagacctgtcattctctgccatttactagctctccccttgggcacctaacttcagcctttggggactacactttcttttgtcagtggggataataatatctaccttgcctgtgccgtaggggtatgtcggtcagtgtccccatggaaacagtaggtactcttaaactaggtgacttgaggagggcttcataaagatgcaggcagggtttaaggacttaaggagggcttcataaagatgcaggcagggtttaaggacttaaggagggcttcataaagatgcaggcagggtttaaggacttaaggagggcttcataaagatgcaggcagggtttaaggacttaaggagggcttcataaagatgcaggcagggtttaaggacttaaggagggcttcataaagatgcaggcagggtttaaggacttaaggagggcttcataaagatgcaggcagggtttaaggacttaaggagggcttcataaagatgcaggcagggtttaaggacttaaggagggtttcataaagatgcaggcagggtttaaggacttaaggagggcttcataaagatgcaggcagggtttaaggacttaaggagggcttcataaagatgcaggcagggtttaaggacttaaggagggtttcataaagatgcaggcagggtttaaggacttaaggagggtttcataaagatgcaggcagggtttaaggacttaaggagggcttcataaagatgcaggcagggtttaaggacttaaggagggtttcataaagatgcaggcagggtttaaggacttaaggagggcttcataaagatgcaggcagggtttaaggacttaaggagggtttcataaagatgcaggcagggtttaaggaagccagcaagtacagtaccccagggtagcagctgtgtggatctgttaccggtaaaggctggaggaacaaagtgaggggcagcctcagagtcagagagcagctatgtggagagggccatggggcagacatgtggccttgggcagcaagaagcagccagtctacaccaaccctgtgtgctgcagttggggagcgaacgccccacctctctctcctcgggtccacccacggacgtcctgctagtgctgcccatgggccggcccaagcaggaagcaaggtcagcttcctggagcaccaggcctggggagagggaaggagagtgggtctgaggacagactctcaactgtccggcacctaggagtccccttaaaaccccatgatgatatgaagtgttattctagggagagggtgaaaccaaaacacagatccaggtttttacttaaaattctcaccgactccggagtcacaggagctcagaagaggagactcggtgggcaggagggtggtcctgggagctgccacagatgcgaactgggcctctgagaagggatgaaatttggatagatcaggggtcagctaactttttctagaaagggccagagagtcaatatcaaaggctttgcaggccacacagagcctctaccgaaactcctcccctccactgctgtggtgtgagagcggtgatagacagcacacacagggcacggcagtcccaggaggactgtgctgacaaagacagggcaggctgcagttcgctgacccctggaatacgtgcaggaggtggacaggcactccagggacagggcatgacgtagggccccatgcacgggaaagaccagaggttggtacggagccagcacgttgaaggatggtgaggagggcagcccggtgtggttggagtttctgcaggaagtctcaggacatgagagagaaccgacagtgtcttagtcggccagggctgcccaacagcgtatcacagacccaggagctggaacagcaggagctgattttatcagtctagaggctggaagtctgagatcaaggtgctggcgggcttggttcctcctgagggtcatgagggaaaaggggtcagtccccaggcctctctttggcttgcaggtggctgtcttgtctctgagtcttcacatcgtcttccctctgtacctgtcagtggccacagttgttctgcttataaggatccggtcacactggattcagcccaccctcatgacctcatcttaatctaatgacctctttcaagactctgtctccaaacatggctacgctcagaggtatgcgggggctgggacctcagcatctgaatttccgaggggatataactcaactcacagcagataagatgaagccaaattacagggtgttttagataccagattggagtcaatgaggtaggaaatgaggaatccttttgcttgttaaccgtaagtctgattagtactttgagaaaataaatacaaattatgccgctcatatgcaaaaaatgtaataagatgggcacctggccaagtacatggcaaagtcaattccttagttccatcctggagtgccgggaagcctggacactggatcccagcagactggtgacctggactcagccattggccttgtatgacatcccaccacactggagaagtttgggtggggcaagcagtgctcccgatacccccagccactgcctgggatgtctgggcctgaggcatcaaccctcttcctcccggaggaggcataagattgacagcagctggtgagctctctggccttggataacgagctaccagctaagttccggaatacacactgggcatttttcttagcaaatctcatgagaggccagccactcctgctgacaggcacatcaggacattacaaagctccatccctgggacaaagtcgaagctattttgggtgaccaaaggtttcggaactaggcagattgtttcatctcgccccacatccatccctcattctctcatgtggagctttgctctggtgccactcagtcagtcatgacgcataaaaagctccgagacgggggcctcaggaacaggccggatattctctatgaggatggttctccccatcctcctgccagtctcaggatgggaaggaagggagtcaggatgtggcagggaggaaggaaacgagagtacagcagcgggcaccaaagaggattttgctcattgtttccttcgtggatttattgctgtcaccttagtgccatttttcttttttatcaaaactaaagtggttctgactctcaatcctttgccaaaaccccttctggagtcattttttattcatgaggatgactttggtcatctttggacacatcatgctggcctcatggtggctaaatgagacccaatttctttttaaggagaacatgagtgttcacacgctgacacagcctgcggcagattcactacttggagacttgctttcagcaatacagggaactgtcaagagagccattcgttttacagagagctcacttcctatggggaaagtgaggcttgtgtgctctgacattgcccattttttgttgaccacagctgtaagaagcctggcccgctgatcagtgcagccatactttcaaagcaccacctggtgtttaatggaggattcccaaatttcagcgagtaaaccctcagagggtttgctaacccaaacaccaaggaagggcaatctacacaatggcttagctctagcactcctcccctagcacagctggtgtgcttccagtttcaagagattattccagggagaaaatgactttttataatctccccagtagtcacacaccaaagcaggtcgggggagacactggtgctgtaagacaataactgggcacctctcttgagacatagaaatagtcctactaagtgctgttcaagcaagagtggccaccaagagtacatgtttgtggggttgaggggagaagacattaattaaaggatgtaatcagttgttggcaattcgaccatacaacttgctgtagccattgatgatattactaaaaatgcaatgatgttagccatcttgagctaccagccaagttccagaatacagactggtcattttcttagcaaatctcttgagaggccagccactcctgctggcagatgtttcttgcactttcaaagaaacctcattttcttgtggagtcttctcaccagaagcaagggactggatagcccagagaaacacatttggtccatagcacctggtaagagggaggttagaaaatcggaaaacaagcttcctgtatagctttcttccccagcattctccttcccagatccattcaataaagcatattgtgccttataaaggatgtgctattatgacattgcctgcagatgagcagacaatcaaacttcacttctaaggaagtgaagcaagttggctttagagaaaaggtgccccttagtttccaaccaactcatcatttgaatggccaagggaggggtcaggctttccatctcatccactgaataagtatccagcattcatgattctaaactttcaacaatttggacattcagcttcctagaagttttccttgaggaatcagctttgataccactatgtaatcccttggtaataggaacacaaacaccatttcaccatttgattcctgcaggtgcttatgggataaactatcgcaaattaataggcactaatgtgttcatatattgcttcttccaggtgagacatttttatttcagaaaggaacctttagatatatgcagtgccccaaaagaaagatctgagacttatgtgaaccatccagggagatgatttagttgctcttcagatcattttccatgcaggtgactgccaacttggcccccatgaaagaccagccctggtcaaattcaggttcataaaatgatcatacagttacttctgaaattggacaacataggacacttaggatgtcagagccaaaagctgaataatgcttctgcatggaaggcgtcaatgttctggactctccaccactaagcagggctctcatcccctcagacagccaccacacagatagaaacttggtgactggcagcctacgtccaccccctatatctccagaaagaaagaccattcattatgagagtcccatgttagtgactgtttgagacacctttccctagaagggaaacttgaaccaagtggctcatttcagctcctaactctcagtgctttttgcatgtaggatttctgagaagtgaaaaaaaaaaaaaaacctgccggttatgaagtttctgttccacactttgtaccttaaagatgagtgtgtgagacacagatcttcaggttaaaaataggcatggcccttttctatcactagccagtctccaaaattctccttaccaggcaacatccaaggaagtccattgactataatctgtgttctaggataagaggatgaaatatagaaaaacctaagatttgggttgcccctcccctcatgcctttcctggaagtgatggtgcagcccacaagttcagcagggcacatgtttccttctgtgagtggtgaccaacttcccacctgcatttgctgccactcattaatattaggttggtgcaaaagaaattgtggtttcagactgtgaattttaaatcattataactaggctcaaacacatctttattaatcaaaagaggaaccattacaatcaacacatttttgccaacaagaaataagatttttattcctattatgtaaaactccgtgcttccagattcagcaaactctcggaaagcattttctgcatcctgctggttgtgaaagcattttccctgcaaaaagtcgagatgcttgaagaagtggtagttggttggcgagaggtcgggtgaatatgggcagatgaggcaaaactttgtagcccaattcgttcaacttttgaagcattggttgtgcgacatgcagtcctgcattgttgtggaaaagaattgagccctttctgttggccaatgccagctgcaggcattgcagtttttggtgcatctcattgatttgctgagcatacttcttagatgtaatggtttcgctgggattcagaaagctgtagtgaatcatactaacagaccactaaacagtgatcatgaccttttttggtgtaagtttggctttgggaagtgctttggagcttcttctccatccaacccctgagctggtcgttgctggttgttacacaaaatccacttttcctcacacatcacaatttgattgagaaatagttcattgttgttgagtacaataagagaaggtgacacttcaaaacaatgatttttttttttttttttgctcagctcatgaggcacccacttatcaagctttttcacctttccaataagcttcaaatgcctaacaaccatagaatggttgacattgagttattcggcaaattctcttgtagttgtaagaggatcggctttgatggtggctctcaattggtcatcgtcaacttcccatggcctgccattatgctcctcatcttcttcattatgctcctcatcttctttgcaaaaccttttgaaccaccactgtgccgtacgttcgttagcaattcctgggccaaatgagctgttgatgttgcaagttgtctccactgctttatgacccaaatcgctcgaatttgctctttaacatcctttccatagtctaaaataaacataaaataaatagcaagtaatacatcattaacaaaaaaataaagtgagaaatgcccattaaaatgatgtataacataaccaaatttatttaagaatgtatttcaataccaaatggcaaattccaacaatgcaaaaaacacaattccttttgcaccaacctaacttgtgattgtgccttacttgcctctcattcccagcaccctgcatagtgacctcgcagaggcacagctcatgccagttctttcagatgaaatgggaaaactctatctgaacagttagctaaagcacttgacatccagaactccaagtccatacataacttcccgttccccatgcaatgattagtgtcttcatgctctccagtgcagtggctggtgtcttcacatgcttccatgtagtagctggaatcttcacattctcccgtgcagtggctggtgtcttcacactcttccgtgcagtagctggtatcttcacactcttctgtgcagtggctggtgtcttcctgctctcccatgcagtggcttgtgtcttcacactcttccgtgcagtggctggtgtcttcacactcttccatgcagtggctggtgtcttcacacactcctgtgcagttgctggtgtcttcacactattctgtgcagttgctggtgtcttcatactattctgtgcagtagctggtgtcttcacactattctgtgtagtagctggtgtcttcacactattccctgcagtagctggtgtcttcacactattccgtgcagtagctggtgtcttcacactctcctgtgcagttgctggtgtcttcacactattccctgcagtagctgatgtcttcacactattctgtgcagttgctggtgtcttcacactattccctgcagtagctgatgtcttcacacttttctgtgcagtggctggtgtcttcacactcttccgtgcagtagctggggtcttcacattcttccatgcagtggcaggtgtcttcgtgctctcccgtgcagtggctggtgtcttcacgccctcccatgcagtgggtagtgtcttcacactcttctggagcactctcctcttcagctgtagccgagacccagcagagctcacagaattcttcttccttatttacaaacttcctcaaatgaccacccattgacaggcaatttaacaacttattggcccatttaaactgattaaaagcagacacatatatgttttggatgtgagccctaggcctttgatgggtctttgctgaatagaattgaattattgaactgaacaaggagcaagtaggtcgaccagtgggttgtttttctacctgcaggtgactccatccaggtgcaaatagcaaggaagcccttgaatccactacaggtgaaagttttgcattgtggtcccatgtgagggaggagacaagtcacctggctattgggtagggatgaaggggataccagggctacagttagactttagcagtgaccccgcttgagcctgcaaagggcgacagctccctatggaaacaacagggatgagtggcagccccctccttggaagccttctcaaagtcactcattagatatgccagatagcctctctctcctggagtaattccttctctccagggtccatcatttgttttgtgatgttaattcatgtgagttgggagtttggttctattgtgttatgttttcctgtatgttttgatttattgaattttttttgtttattttctgtgataaaaatggatgttctatgtgaaagctgagttccttgtttctttctcttgcccgtggctgactgcgtgtgctctattgatgtcttgttcctggttcttgacactgaccatcttgtctgtgaaaggaggcactccggcgggcatgcttgatcagaagaaagggaagtttgcttggtttagtcactccacagaaacccatggtaatgttcccctgtgctctgtgtgtgtaaatgcgtgtgggtgcataccagactgaatgggaaggtgtctctcttgatggcttgtgccgcagtagttctgtgtgtgtgcatatatgtgtatgtatatatgttgtgtgtgtgtgtgtgtttgtgaagggatggcaacctgtccccctcaaagccactgccttatcattgcttcatatgtgtaaagtcagtgggtgtgacaaacaggcagagctattcctccaggagctcttcctctgggcagtgctggcctagagtaagcacactgtgaatgcacggttggaaccagcacaggcagtgccttgatttagaaggtgctgtcgttatttccagtgcccaggcctgcccctccgattttgtctgtctttccaggcctagcaccaccacctccacagcactgtactcacacataaggctctgggaacgaagtgtcacaaagtcacagaactttttctacgtggcctagcccttcaaacaaggatgtctggagggtagagagctaaaaactaaaaataaaaaataaaaaaaacctttgggctgagatggctggagatagatgggttggaagactgagagtgcttccattttatggcttccttagtgtggtttgagcaaagcccctggcaagctctgaaggtctgagctaaaaccatccctaagggctggtctcaccagcccctccagacttcagactataaagtgagtgtaatgctgtggaattcagtgcccctgtttggctactcactgccctcctgtggtgctcccagagcctagtaggctttaagaagcttgtctgcctagggtgtagagtacagaggtggtcgagactggggcgctcaagatgaacatgctacaggaggtgtgacacttgtgccctggacccagccctacttgaacacaccatatgaccatgggcatcacatcccttctctggcctcactttcctctcctgcggagtgaggaggacgagttagagccagataatttctaaagcctcacccagccctagagttctataaaatgacatctggattttttttaattcaattttattaaaaaggtcagagaggtctctcatacacaacagtcaaacatacggtaagtcgtggactttctgtttgtatcttccatgttcttgaaatgattctcttctcaccaacctggcttgtcttcatctgaaggaaaggaaaccaggaaaaatccacatctatcaacattatccatgcaaccagtaaaagtgtttcttgggctctggcagcctcgcagggacttgtcaccagaggccactccctcaactaacagcagattctgtgtctgctgagggctgatgactttctcagcatatgaggagttctattctggaggaacagcagaaccaggaccaaggatatgatggccactctaaagaataagggttacaaaactaaggaacgcattgtatcatagtaagagagtgttggaaggtggagaaaaattctttgagttaaacttttatttagaagaaaaaataataataataaaagaaatggcttctttcaagccaccaaactgggttctaagccagaaaactcccattgttctggaaattcagcccacagctgccttgggaggaggctggacaagttgaattaaacggcttatatccaagtcagcctgttgacatgggaatgtcagggtggctgaaaggggaaatcgtatccctacaggctgtcttctgaccacaattaaacataattgtgtggactgcacacttccactcctcactccttatgtctgcagggctagcttgaatcttagtgcatggctctggggatggccattcccctcaagccctctgtctcagttgtgctcctgggtgtaaccaactgccggaaagggaaggcctctgtccacccagcagctcatcaaggtagcaagcacgccctttctacaaacaggctggtccctgttcttggagatggagccccttagagatggtgggtgggatgaagtaaggaaaatgatatattttcatgaaagctcctctttctgtggcaagtggtagttgcaaatggaaagcctctacagcttcttccagtccacagagtggagaggagagattcaatggtcagttttttcaggatgtgtcctatgaggtaaaatgctcttattaccagatgtcctcccatacttccattagtttacagtgttcttggcggcaaaacctgcctggacaaccagcagatgtgtccatcaaggggatctgtgcagatcagccagccagcgtgctcagcctctctttctgccaacccgcactgggtcttgcggtgggcgtgttgcaaactactgctcttctgttcccttgtctccccaccctcaatgcctggctctgcttccctttgactcttgcagtgagcatgcccaccagtgagaccgagtccgtcaacaccgaaaacgtggctggaggtgacatcgagggagaaaactgcggggccaggctggcgtgagtaggcacggcgagcccaggggctggggctttttctggagcatgggtggaaaagctgcatctggaaatcacagtgggctggctcatcactaggaagggcagagattagagccggtggcaagaaacaaacctcaggtgggaaccaagatggggagcagagggccctggggtgagggtggccctggccgggggtgagtcttaaaatcaaggctagtcttcaattcatcacttcttcgggggtgctgactcttaggttttgagcctcttttcatcacatctgagaaatatagagggtgtgtgtgtagggggcggccccaaagtctgtttctttcactccagtccctttcgcccctcttcaaagagacagcgaggttagggccctgagtcctgctggccaccctttccattctgataaatgtgacctgggagagaagcagccaggtgagaagatgttctgggagatgactggcatgtgggtccttacctgaagctctctcatcctgccagtaagggaagcagaagtgcagtggagcctgctgttctgttgccttggggtgtcacgactgtaaactcaccctggcctctggaagaactgcaaacagaggctctgagtcagaccagtcccaggtacaatgcatttctgaattgctccacctggggggcggggcagggcggcatctcccttccctcctcgtctgtggaatgatggagagcctgggcaagcgcagccctttcacaacgctgagctgtggaagagtctaaacacagcaatgccggccttgagcgtggcctgggagcccatgttggggagggagaatgaggctgacggcagagcagctctcacagccgctgtttccagggagcgtggagcttcagtatcactcactctgacactggcaccagggagtctgcactgcagatttctcagcattgtcgggaagcaattattgtcaaaatgttgttaaaatacgatgctaattacatttttaagcagcagtgcaaacctcttcttttggaatcatacaaaacaagcacttgagtttctggaagtaggtcccaaacagcaactctagggaaaggcctataggaaggcttcaaagtctgtcagttctaggcctttctgttgtcttgccaccaagacgaggcttagagagatgatcaaaggccctgcaactctggctgttgggcaggcccaagtcgcataccaggagggactagggagctggcaccaggaagtcacttgatagtacatttcaggagagcatgaggctctgttaggaaggaaacatgatattcccccacggatggagcctggcagtctccagtggatctgtcgtttgctcagagcacatgctctgcagcctggagagctctgcagaaatggtccccgttatccccatgtttagccacattcgtactctgtgcatacagaacgctgagtcacagtgccagaattataatatgccccgaataaaatgtggtctttccccatctccctacctcccaccccgccccagacaatgatgagccaagactgccagcattcctggcgggagaagcagcatgggaactgagattgcgtgtgatggtctgaggggaagtgagtgaccgggatctttaaagctaagggttaaaagtctcatgtaatgagattaggtcacgatgaggactgctgtgtagtaaggaggcctggatgaagacggttcctgttgggggaagggaggaaggaactacggcatgttacttcatggcagcaggggcaggcgggtgcaggtaatgaagaggaaggagccgtcacagtcagggaagaggataatgaggcagaagtgaaatctgaagcaggagcccagttggagtgacctgcgggtgtcatggagaccacgagatacggaggcccgaaactcagccctgaacaagggtggacacacatgtttgaggttgttgggatgaaaactaccaatgaggtgataggacgggttgttcagagtgaagtggaaaacaagaccaagggctgaatcttgggaaatggacacacagaagaataagaccaagcaagcaaaatagacaaaggaatgttaagagaacaggcagcagcgccagcctggaagccgcgggaggaggaatttcaggacagagctgtttatccatgcattcgttcaacagtctgcccagcttggtgctaaggctaggtggtggtgacacacaacagggaggaaattgacaccatcgtgctggagctcacagtctagtgtgggagagacactatgcaaataaataggcaactataggattggggtaagtgttatgaaggaaaagtaagtgtaaagtcgggctaataacaaaggtttctaatttggactggcaggttaggaaaggcttctttgcagaattaaaattccagctgagaacagaaggatgaacatgagttattgagggactggcagacccttaaccgtttgggtctgcatcagaagagtgtgagaagtcactgaagggcattcagaacagagctgagtgggaggttgatttggttagttctgagctcctgaaggatcactgcgacgtcaggaaaagagcagggaggaatgagaagctgcaagagcctgacacaggtgagaggtaatgtggcagcagctcaggctgcagagggaaagaagggctgtgttgtgtgtgtgttctggggtgctacccctcagggttgcagggcactggtcttgggagtcggtctcagtgagggagatggggtggaaatgggccacgacagagtgctcactcaggcagtgaggccatggacagggaggaagatgggagcatgtgaagaggagtagcatgagtgtgggaagcgctggccttcattgtaataaaggcaagggcaaacttcaagacaaggaagaagtcacggagcaggaagaggtgaaacaagctgtaggggaagcaagtgcttataggaaggcattgcttctgaagaggagaagggcgacagcaaagacagtttgaggccctgaacttgctcaggaaggaggaatttctgtgcacctgaaactaattggaaaatgaaagaagaggagtcccagagtctagtgcccaccaacctccagctagccctgggatcttggccaaagcactccgctctgggcctcagcctcgtcctctgggaaaaagaagggtcagactgacatctctgcagaggctggggtggggggcggaaaccacctgcagcggtgcaagatttcatgtgaagaaagcattctacacctggagaaactgcaaaccgtaggtccatgtggtatctaagggtcccttccagttctgtaaagcctacagttctgtaaagaatacagaatcagaaacaggctctgatgaaggggtcagtgacaggagtcactccgaatgagctcagccatctcatctcccaaagcaagggtcaggggtcacaggaacttgaagggcagtatagagactgaaaccagtgagtcgtcgagaggatgctcaaaggttgctgggcagcactgatgccacggtggagactgatatcataaatgtgcagtcagccgtatttttggcagactctgaagcctgagagcactaaaaagagacagcggcgtgtcccagggtggggcttagccatgcaggcatggcagaaggcccaggcggtgtggagtctgtgtggtatcgcgggcaacattgccatgactgtagtcaagcctggtgttaaagggtgagagtgatggggaggatccagtgaggacaaatgttgggtcctctgaaagagcaggagggatcatagaaagggaggctctggccagagtcatggagcatctgagctcagcacccaggagtggaagcaattctatgccgtgcaagggcaggatgtggccctcccaataataagagctgtgggggagaggacgtcctggagttaaggatgctgagtcagacgcattgtcaatgtggatgatgactgcagtgccatctgacttatattaaaggcgaatttgggacaattcagggaaatactattttacacagcaggtagtaaacatatggcactctttcctctaagaagaggggagaggctgaaaatacaaatggctctcaagaagttcaaatatgtctcaaataatgacaaatgcaaactgagtaactaggggaaaaaaggagtttggggtttgtctctaattctgaacctgaaaagcacgaaggaaaatcatggtctcccagaaggtttgtcttggagtcctgggtggagaaagtatctggggttgcatgaacttcagttcctacccagtggatctgttctgatggtctcatgttccttaccagccttctctccctcctcgctcttcttcaagaatccgctcaacctgaggtaggaattgtgcctcattggaacaacaacagtggagacaaccaggaagccttccgagtgtgctgtgcatagagaagccagagcccccagctgttctcagagttctttggagattgtgaagatcggtagcagggaggcattggccacagtgaaccggcctagggtgtggaccagcaccatggcaccaaggcatctgggctcctgatggcaccgaggcacccgggctcctggcttgcgtcctctcactgcaggagcacctttccagcccagaaccctgggccacctcccaggaggcaaagaggtcctatcattaacgccaaggtgtgcaaagggagcagaaagaaccaaggcgttcagacgtcacagagttctcacctcagctccccatgggcatggagttttccctggcctccagacaaaagccgctgagcagtgtcctccccttcgcaaggagtggagcctgcctgacatggaacttagccatttggcggttgcttgtcaaaagtgccagcctttaaaagcggatgaggttttgatccccatgaacctaaaattctgctcacaatcccggaggatagcaacaatagcaacaaaatcagtcttcaagtgtggtgcccaggcttatccatccagacctgtaacaaagcagacaagaaggctctgtccatttcgtgctcagaatgtgcccggatgccacagaaggacctgtagtccacgactgtgcttgaagcaggacctcctttcccagcacccccagcgccaatcctgcttcccagggtcatttcccttggagacgaacactcaggattaggtttccccagaggggagcttttcagagcccacttgcacttgtgacccgcttgcactgtgagcaagacaacgcctcatggcaaagggccggtggtcgtcatcaaggggcaccccagacaggactactgaggtgtttctgaaagaaggcctgggaccaggctaggcttggagtcagagtgacaaggctgaagtccatggtcacccacttgagcttatggttaacagcaaggggagacaaccacccaaaagcagcctgggaagacactgaaggtctggggctcagcatggccccgctggagaagagagcacctaggctccccagcacccaattagcagctgggaaacatttgtttgctggttaaactgtggctgtaaataacaatgctgccctgggctcccagtccccctcccacacgctgttaacctgtgattaagccctccagccctcacaggcagtctttgcgggtgggatgaggttattagctaaccgttcggagcagtaaaggcgcttggctcagactcgcagtgccccagagatgtaattatctcatgcacgatggctttgccacctgtcacatcttctggcttaatttttttaataagaaataacgagaggggctggcgttttcttgctctgcgacacagctagctgtgtgccgcgctgggacgtcgcaggcctgcggcggttgcctcccagactcccttctcctgtttcctccccatgcctctccttgttgctccaccactgtctccatccctttcttcatctctaacttgcgttctgtccttctgcttctccatctgaacattgtcaccacctgcactatccccagcgttcatgcccttctcctagcaccaaagccaagctgacaggtgccttctaatggtctcaactgcttacattctctcactctccctgtctctctctctttggctcagccttctctcctccacacttctcttttacagtctgtccctcctgccctcttctccagcctcctgcctcccctggactcttccctacatgacctagggagcctcaggacttccttgaaggttctgcctttccatggaacctcctccctgttccatgacccttccaggcagccaccctcacacccaccctgagcttctgcccagaggtccccaggtcttcagggctgcgtgtgaccgtcagcatcctgggtttctcctcggagtctggggctggcgccttaggcctcctctgcagctcttgggtgggggctgttgtggcccctccatttctggctggctccttttgctggtcttcccttcataaccctactctagctgggctctggcagacagctgtgaggtctgtgccgacctgttcttgcctgtgatttttctgctgttggggtcctcttgtcatcaggagaggccttttctttctctgcagcttgtctcaagatacagctcttcctaacctgacctcatagaagtttctaggcagaccctgaggacctgctactctccctctgcagcaaggattgtctatacttagaagatgctagccaggccagacctcagtctccacattcaaatacataaatagggttctttctctcccaagatgttctagttcacaccatgcctccttccagcacccacacgaaattacctggggaacatcaaatttccctgggactgttgaccgtcttttaaatgcacgtgtgtgtccatcctttggtaacatttcctttttctttttcagccaccggatctccaagtcaaagttcaggtgagtgagactcacgctgctcttccttccttctgccaccagctctgtcttcagccaccctgttgggtggcccaaggtaatacctacaagttgccagtagtgtaagggctgttcttctaagggggtaactactttctgtatggccatcaagaaaaagcttatggctcagatcagacaaataatccagcggttgatatttgttgaatgatcttggactgtccatctttttggcagcacagtccctaggaagttgtcagaccaaatgtgttttcctcccttctaagatgaagtccagttaaaagaaacataaagtgagcccttgtgactgtcatgacctacttcatgtttatagaacatggtgagatgtaacctttgatgatgatggaaagcacgtaggattatgacacccgtctgtgtcactgctcttgacaatgacagaacctacaaaaggatccagggtcctcagcccccatctgcctcccagcctcacttcctgcacttccatgaaaataacctttgttccccctacaaggaacttcttgcagttatccaaatgttccctgtcctggtgcacactgaggcccctgcatggagccaatccttcacttaaatcactatgcccccatgccttcatctggagaactcacacttctgttcagaccctcagatgtgactgcttccgtgttactgctttctctgccatttcactgggcctggaaaataccttctgcaaactccagggagagttactcagctcccccttccctggtgctttgctgatgcctctgtcacagcactcagcacatgacactcggattactggctcacagtcccctgcttccaaaggctctgcctgcatgcctccaggggttatttccagagcacccagctcagtgcctgtccagtggtgaacgtccatacatgtgtgttgaatgaatgagtggacagatgtgtgcagggagaatgtgaattcactcccacaaagcttgtatgtgccaaaaaatattggttatttttcataattgagctaatcttgtttccctagccctatctcctacatggcaggagcatagagaaatttttatccagctgagtaaatgtagcccagtgctgtattttaaacagtcccttaaggtaaagtgatttgtctctcagattgcctctctcccagctcctctcttggacggagctggacacatggcggagagggactttgagatcccaggaagcagggaatgatgagggctggtcctagaagccacgcgagccctctggatgcttgctcatctctgctgcatggggctaggctgaactgctgtctgaactggtacctgctgaggtccatctggttagggcatccactgctggagtccatgcccttagggcatccactgctggagtccatgccctctacttgcctccggccttgaaatctccacctctgctctctgacccttgagttctgttggcccactgactttagcacctctatacctcagctgaggacatggacacttccaggtccctcacactccgtgaaggagctagaggagacagcagccctatgacaggctcattggcctaccggtgtcccatcacaacctctgtaacagccaggataagcttcaagccaagggctgaccttctcccagggtctgccgaggcactccaccagccccagtgttgctgggcttccccgtggccatctgggtgtttctaaagcaactccccaccaacctcttgggctgtggtgaccaagggctaaaaattaagtggggaccctggtgtctgacttttgctccacttctgataccttctttctctcccgtttcactaggactggaaaatacaggcttttttcccaatccttgtttctctcaaaccaagacctcatctacataaaacatctagggtcaggcccatccactctagctcttattacagagcaagagctccagaaatattaaaaaaaaaaaatttctctctctcagtaatgcttggctgttactgcttaatctccagcatctggagaagtggctggtacataacaagaacctaataaatatttgctgggtgagtgagtaattaataaatgaatgatcttgccccagtaagacaatagacttgacacagattcaaacaaaatatctaatttgacagtcaaagctgaaaaagcatgttgtgctttaacagttccaaagcccccacacaataagagtaaagggattaaaaatacacttgaaaatatttccaaaatatcattctcagttcatgcaagtgagtaaatcataaattaataaatgaatgaatgaatgaatgaatatgatctggaggatggaagggaaaattacatacttgtgtctcgagttagagattgcctggaacactctgggaacattattttcatccagtgatctatggtgcaaactgtgcttttcaacaagagggaaagagcagtggtgcctgtaaacctctggagtctccctcggccctgaggctttgctatgtgctggccattcagccctgatcatctgcctctgggaaggccttctccttctgcagccacccctcaatacaccgcagtaatgcggacggcagattttgttctcctaaaggcttacagctagtagattggcactatcattgaaactcatttccagatgaggatcctgaggctttgagaggcccaggtcacagggctctagtatggctgagtcagagctcatacccaggggctctgctgccaatcactgtgccatccttgtgatgaggttctgcccgggaatagtaaaccctgttcctgtatagctagtgtgtccgcagagtgtgtaactctagagccatgctattcaacagaaatatagtgcaagccacatatgtacttttaaaaatgttctagtaggcaggttaaaaaataaaaagaaacaggaaatttctttgatttaaaccagtatctctaaaacattactatttcaatatgtaattcacataaaaattattaatgacatattttgcattcatccttttgtgccaagtctttgaaattcagtgtgtgtttttcccttactgcccatctcagtctggactgaccatgtttcccatgcacggtagctgcatgttgctagcggctgccacgcaaggccacgtggccctggaggtttcacacatgagcaggtatcacacagcagccgtctaatctagattcagcagttcactgatggtgtctgcttagggaatatcaaaggttacaaatagattgaaaatgccaccaacgttttcaaagtattcctgatcattttctcaagttaggtgaaacagtttaacaattacagataatggaatttgagtctcaaactggccttttcctttgcaaaacagaatgatccaaagtcacggtttctttaaagaactgtaagaatggagtctctagggaaaatgtggccggttagtggattacagccatagtggaggattcccttggtaatccaggttttcacttagaggaattagttaaaataagagatttgtgacatttggagctcactgttcagaataaatgtaaacagttatgaaacaaatgattcaggaagtcttttgtaacctgaagggattgattacacaagttggagtttctggatctcaactttacggagttctgaagtgaacctcacggggttctgaaattgggaggactagcttgcccagtcttcagtgaaatgtgcttccaatgttctcttcacttctgccataccatcagcaacaaggcacaaatccaaatttgccccaatctctaatagtcctttgtaaagttacttatttacaagagaattaaacttaatgattttctgtggtgtttgttgttggttctggtaaaaaaaaaaaaaaaaaaaaaaagtggaaacttactctagccactagaaggagcctgcagggcccatcattttgatgttgtcgacgattccagatgcctgtgcaccattgcatgtcaagcaaactattttaggagcactgtccgctcctcacctccaccctcagccctggttcacaagagctccgggaatcttcaagccttgtcttccagagggaggtagtacatttgcgtagagttcgtctctgctgctcaaccgtgccatcagccaggggttcccgtgcaggatggactgtgctgagtcccatgggtctgtaaccaagtgtaagacacaacccgattccttcgtgggtcttgtgagctccgcggagaggcaggaaccatacaaatgaaacgtaactgacagtacaaggaaatgggaactcatttcctctggggacccttctcgcctaaggtgtcctttcgtgtgctccctggtggacccgcccagcactcaggccctgctgtgactgctcacttagtggtctgtgtctccgtgtagcttttacgcagaggaggcctgtgagcgctgtgctagctactgagtatctggtgcctagcccgtggtcagtgtttagtaactatttcttggatgtgtaactaaaatgagtaatgcagacagtaagcgctgaagagtgccaaggctgagaagactagaagcatgcatcgtggagaagctgggactcagtgtgagccccacaggaggggcaggacagacaggatgaagcaacggtggagtttccggtagctgggaggacttgccttgcagctggacaggcaagaggaaggcccagtgtagggagaagggcaggtggagctggggctgcgagagcagaagtttagaagcagtgatcccgaagtttagagacatagatgagacccattcgtatccatccctctctcctgtgtctacatatggaaggttctatttctagagaaaatgacttccagttagtgtgaagggaatatgaatagcaggcaaatttctcctccctattttatcatttaatttctgtatcctccatgcatatgtaaacataaataaatttacacattctaataaaccattacatttattatacagtaggaagtgttgccaggaaaccagttgtcaagcaaagctatattttgaagagtgggaggtgcataattatctttaaatactttctctggatagtaattaccccacccccaccccagcccaaatccatgtgactctcccaaatgggtctgctcaggagcaccccagttgaaagggacaccgtcctgtccactccggccactcctcaggggtctgtgcagagcagctccagacccatgggaccagcctgaccacacagcacccatatccactactcccaagcatgaggaaaaaggggcataatcaagctctcatattaaacccactccaagacagctctacataccgcaaagaaagcaaccttgattgccttggactctgaataacaattatcagtgatttctggaacttgagactgtatctatttaaaacatgttctttgcaaacttcactgtcagctctttaagatcagatatgagtttgtcctgaaaattcattttttaggggaataaactacttgccaaatttctgtacagtattaataatcacaatcacaggaaaaaagcagaggcatgccctgcaagataagactgtttagtatcaagatctggcaaacttcagaggtcgcctctcaagaggaccatctgggactcattgtctcatttctttgtccctctgtccaccctccaccatcctccctcggatccagggcagtatgtctgggggtgcaagaatcccaaagtgcatttagaaatcataacgttttaaattgttaatgtttatgggcactaatgggtgtatatatttatgaggtgcatgtgatgttttgatccaggtgtacaatgtgcaaaaatcaaaccagggttatcagggtgttcctcacatcaagcacttatcatttctttgtattacgaacattccaattccagtcttttagtttattttaaaatatgcaataaattatcatgactgtagtcaccatccttctctcctatgttgtatgatcaaatattacatcatatttattctatttaactatattttttcacctatttaccatctccactaccctttccagcttctggtaaccatcattctactctctgtatccatgagttcaattgctttaatttttagctcccacatatgagtgagaatatgtacaatttgtctttctgtgcctggcttatttcacttaatataatggcctccagttccatccatgttgttgcaaatgacagaatttcattcttttttatagctgaacaatattccattgtgtacatgtaccacattttcttcattcatttgctgatgggcgcttaggttgattctgtatcttggctattgtaaatagtgccgcagtgaacataggagaacataggagtgcagatatctcttcagtatacagattggaaaccatgttttccacctggtggcctgcttccctgtgtagtggattttcccccaagtggtaggccagtgtcgcatgttaaggtgtggccctcactggagatggccttcaagctagagcagaacactgcctggattaatcctttttcccctccctgctcctcaagccaaaaactaagttctccctgcagtcctgaagaaagagtacccttctttgattactcttcactctcctaacctcatcttagatttagcaaagtcttggtaacaggattttctgcagatcatagatagaaaaatgacagagtagaaaggtggatgaagtcaggctactccaagaggcaattttgggggtatgtgcagggatccgtaacagcccaggttggcatcttggagtttgctgatgtttggaggggcttctgccctggaagtagaggaccaaggctgagggcagtgcacacagcacggagctgtccctgccccctggggcacacccacatgtggtgctgctacatgcccgggggctaggaaggaataggccattcacagaccagtgagttcacacagatggggcttgctgttccaccaccagcataacttgacccaggaggtgacgctgaggcttgatggtcatctctggcaggaagattggagaaacggactcatgccatggactgtgatttagaatggaggacctcatttcagcttccttgcgctgaagtggagggccggttttcacatccagacttagtatgccacacacagacacacacacaccggaaacaaagttttatgtaaaaatatttttgcttactgcttactttaaaaagcagtttccttacgatatgatacgcactgtgatattttccactctattcctttattcagtgccaggcatgacctactcaatagatttcatgacccactaatgggctgcagtgtgaggtttgaaacctctgcccagaggcagattctgcatgcttatttagaggaatgtctgtctagacgagagagattcatagaaaggagatcattttatggaaaaatacagatattcatggactttatcaccaggattctactttgtttctcctcctgccttcattacccaggcaggagctgtatcttcaatgcctcgtgggtctgcgtacaagccctacaggtgccccaaagccatgtgcagagctaagcaccccatttttctcataactgacccctctgcctggagctctactcccgctcctctggccctcctctgtgctgccctcccaaatcgccccagctaaaaatgttggcagtcccttccatacctgtctttcttattctgcacatccgctcatctcaagggactattgattctgcctctaaaattgctgccagctctgtgtcatcttttccattaatatagctattgccttcatcatctctaacctggagaacaggaagagaattcctcatactctccctggtctagaaggtgacagaggggctgtttttgtggggtgttccaatccaacctgatcatgtcctttccccctccccaagccctcagcatggcccctgcagtctcctcctcagcacctctccagctatggttcttctctccttgcacagtgcagccatttattaaccatgtcgtctactgaattcaaccaaacagagctgtatattttctctgtatcaggaaaatgaaaacgcctccaccatagaatcttaaaatgtgtttctttaggatcatcttagccactggttctcaaccatcattacacattagaaccacctggggagccttaaaaatacccaaccccggccgggcgcggtggctcacgcctgtaatcccagcactttgggaggccgaggcgggtggatcatgaggtcaggagatcgagaccatcctggctaacaaggtgaaacccgtctctactaaaaatacaaaaaattagccgggcgcggtggcgggcgcctgtagtcccagctactcgggaggctgaggcaggagaatggcgtgaacccgggaagcggagcttgcagtgagccgagattgcgccactgcagtccgcagtccggcctgggcgacagagcgagactccgtctcagaaaaaaaaaaaaaaaaaaaaatacccaacccctagagaatcagacttaattggtttggtgttggggcttgcggaccagtggggttttggggagggttccctaggtaattctgtgtgtagccaggtttgagaatcactgacaaaggctcctaaaccaagatacggggaagagtccatggagcatggatgagctttgaggggtctgtgtgctgtgtgggctctcaagtaaaggtgtgtgtgtgggcatgtgcccatttttctgaaaggcagatctaaacattcatcagattctggaaagattctataacccagaaaaacaaagagcctgtgctccagatgaaccccttctaccatatggatgtggcacacacagtcagggccaagaggctgggcagaaaactacggatggctctgcctgctgtgatattggtcgagtactcaacctccccagccctgagttttctcctccacaaaaatcaggataatgcgtgctttgcagagttactgaaagaattggagagaaggcatgagaagtgcctgatgtggtactgggcccctcctccactgttactaataatgctcttattgcttacaacactatttctaagaatgctgtttcacaaaaattaaaaaaacttccatttattgagcatcttcaacttcaaagcagccagatgcattataaggtatttgatccatccccacaataaccccatgaggtcggccctcttcccgggagaactgaagcttggaggagttcaggggcatccccaaggcggcagggcctggttagctggatgagaagctgggctccttgccaccagattgggctgctctagcaaggccagatcagtgaggggcgagaagagccatggtgctgcatcttgggttggaggaaacctgaattcacagccaaccccacccttctctccctgtcccctttccagccgctactggcgccggtggaatcggttctgcagaaggaagtgccgcgccgcagtcaagtctaatgtcttctactggctggtgattttcctggtgttcctcaacacgctcaccattgcctctgagcactacaaccagcccaactggctcacagaagtccaaggtgagcggcggccccagctctgctctggtttcctcctggtaactcagccccaaggcccaggggagggcataaccacaggcagaaggtggaggggaaagcagccaatggtcggggctcttggcaggtgctgtgctggagacaccaagggcctggcagttccaaagccccacaataaaatgcgctaccttgttaaaaacagacacggctctcctgactgggcccacaccatcagcctgccccaaagtcactgttggacccaggtgatgaggaaaggggctgcagcttgtttgcctatctcagactcctggctgccaactccccagcatggattttaaatacctgggggccttcctacagccctgaggtggccttaaccagaacacatgaggatggaatgagcaaaaaggcagagaagagaatagggcctgagcacaaggaaccgtcttcaatgggtcgttcattctcattatccttccttgggcccctagacgagggtcccactagccaggcctcagcatcattgctgggcagtcaagaagacctggccccatcctccacagctgctttccagagtcctgggaggcagggggtctagtggcggagaagtcagactcagacagtgcggctccaactgttggctgtttggcctgcacaggctactcacctctttgaacctcctttctcatctctgaaaatgggcatgacgatggtggtaccatccccacaggcctgctatgaggaggagagattgtgtgtgctgagcctatggtgcatgggagatgctcagtaaatgtctgttatgattgtgacgagagagccctttcccattggcttggccccaacttctgttctggccgaggtggatgggagaggtgtcatgggggatcttttttccaatggagataattactgtatttcctttccctgcctccctctctgcctcctctggccctgctcggatctcatccctctcctgggcctgccagacacggcaaacaaggccctgctggccctgttcacggcagagatgctcctgaagatgtacagcctgggcctgcaggcctacttcgtgtccctcttcaaccgctttgactgcttcgtcgtgtgtggcggcatcctggagaccatcctggtggagaccaagatcatgtccccactgggcatctccgtgctcagatgcgtccggctgctgaggattttcaagatcacgaggtactgggctccccctctcactttgaagaggggactcaggaagaagttcttccagagggcaagggaggtggcaaggcctgggtgggaggggggctgttcttcctcaaagggtgtctctgaagttcacatgcaatgggggtagtttgtgttcatttagatggcacatcatttggaaattcctctggctgctaataccagagactcaactcagtaatgtaagcaagctagggacttattcagccatggaaaaaaagtccagaggcagctagctgaggtgccttcaagaagagggtcagggactcaatctcttctcctgtgcttcaccagccttggtgctgattcttctccagggtcataagatgacttctggagactgagccatcacattcaaattggaggtgggaagaagagaaaggagcaaaagggccgaccaccccggccaagtcagcttctccactcccagaagtcactcccagacacacccattaggactgctgctgtcaaaaaaaactgaaaatcataagggttggcaatgacatggagaaattggaacccttgtgcactatgggtgggagtgtaaaatggtgcagccaccgtgggaaatggtatggcagttcctaaaaacgttaatgataggattaccctctcatccatcaattccacttctgggtatatgcccaaaataattgaaagtaggatctcaaagagatatttgcacacccaagtgccttagacagatgaatgtatttttaaaatgtggtctacacatacagttcaatattattcagtcttaaaaaggaaggaaatcctgacacatgctacaaagtagatgaaacttaaggacattatgctaagtgaaataagccagtcacagaaagacaaatactgtatgattccatttatatgtggctcttagagtagtcagattcacagagacagaaagcagaatggtgggcgcccagggctggagggagggggcagtggggagttagtgtttaatgggttctggagatggaggatggtggtggtttcacaacagcgtgaatgtatttagcaccactgaattctacagtttaaaaaaaaaggttaagatggtaaattttatgttatgtgtattttaacacagtgaaacaaattggaagaaatcttccagaagtctcagcaagggcttctgttcttgagcacctgagctgttagggaggctgagaaatgcagtattctagcaggacaagttctgctgaaaatgcgttcaagatctagccactgtaaagggctgtggacactgcactgcagatggtgttcaccctctgtccacatggccacccctccatatgtcagtccggcacctacccaaagcaggccatctccctcactgtctaggccaagcagtgactctcaagacaaggacagggctgaggggcaccatgctctaggacaatgattttcacctgacttatgaccactgggagtggtggaatccatttattggatcacaaccatcattttaaaacatactgaaatataattcatatcccatatatttaccccttacaatgtgtaacttaattgtttttttatattcatggttatgcaaccatcaccatgttctagttgtagaacattttcatcaccccagaaagaaactccatacccattccacatttcccccatcttccctcccagcaaccaaattcactttatgtctctatagagttgcctattttggaccattcatgtgagtgaaatcttataatatgtgtttttgtgatggcctctttgacttagaataatgttttcaagggccatccatgttgtagcatagatcagtactttgtttccttttatggtgaataatattccattgtagggatatactacattttgtgtattcatgtatcagtgatggacatttggttgttactatcttttggctcctatgaataatgctgctatgaacattcatgttcaagtcttcctatagatgtaggcttttgtttttcttggataggtacctcggagtggaatttctagattatttggtaacaatatgtttaagattttgaggaactgtcaaactgttttccaaagagactaaagcatcttacatttccaccagcaatgtataagggttccaatttcttcacattctcacaagcatcgtttttaaagaaagaatgaaatagaataggaaaacatcagagggtctcacatgaacgtaaacattgtttcataaaaagctgagatgcagacctgacttgcagtagaatacatatttcttaatgtgcgttatgatcaaccttagaagacatatgggaaacacctggaaggaattttcaacctgtgcccctctaaggtacaagtcccctgtccttaaaaatctgctttgggggctcccaaaatctctgctttggggaatctttgataacaggagcactaaaaccatccgttggattgtgatgggtaaaaagggatggaggttggtgtcttcagttcaggatctggagctgatggcatcttgctcagagcgtgtttctgagtgtccctaggtgttgctcttctcgtcacaattctcttggcaaccacccagagcatggtcacatggtgttgtggatggtccggggaggtagacatttaaagtgtttcatttagtgcacagaaaggactcaatatgcagaagcttttattattcatctaatattatgactgctattattagaaggaagaaagagaagagagctaatagtgacctacatattcacatactcttgttcttacttatttacccactacgtatatactgtgtattgagctcagagagatggaaaaaatcgaaaaataaggcgtatggcgtgaactaaatccaggagaaatgtatagtctggttggggagatggagtttgtgcacatgaagagattaaaggaaaatctatgacagaatataatgagctggcaaagtgtggtgggcgtgggaattacctgctgtgagaaattgggagcaggagatagctcctggagaaggttgaatctcagatgagggacttaacagacacccacgattaaaatccagaagtttaatgctcctaagcaacagccttctttccctctctgaccccatcgaaagagagctcttcctaagtgtcctgaatatgttggcattacagaaagtccttggtttacagtgaaagtggtagaaatccttatatcagcaatgattaccatgcaccagtgcttactctgtgccagatagggtgagcagaggcctacgaatgttagcttgagtgatcctcccaagtacctacatgaggatgaggataggctactactattattattcccactttgcagatgagagactgaggcttagagagttgtcagttgcccaaggtcacaaaactgctcagaggtaacactgggattaaaaggcaaggcaggtctgtggtctgacttgaggtgctatactcctaaccactgccatgcactgcagagctgagagctgacctgtcttcttgtctaggtccctgagacaggacttaaaagatctttatgccctggttcttgttagataattgccgattctacttgctcctcctggggtctggtaaaactatttttaacttgcagttttcaatgcctcttaaataattctcaaaagtccctgttttgggcttttatgtatatatttctatagaaaagaaatcttgctgctatatattgttatgacatcttgaaaagatttaacattcattctatttttaatcaccaatttatttctaatctgaagatattgccaagaaaccatttttaaaaatctatcttaatcagagagcttcctgtagtccctccacaagaaggagtagtagtattttcagatctctatgaagtctataaacagaaaaaatcattgtctaattgaaagtgactgtggcaaaggccgtcatcttcctattttcaagtctccaaagcctctgggggctttcggaaagcaacaaagagactaattaggttgggggatcccataagtccgtctccagcgccagccttgggactgggtgacagtgaccaagaaaaatgcctaaaatatgggttgggagtggacattgtggtcccttcagctgaaccttgaaatgggtcatctgtgcatggtcctgccatcagacaagtgcatgccttcttcttttaaaatatcttggaaagtactttgcaatgtcttgctgctactcatatgtagaagaaatttcttctctttttttttttttttttttttacaatgtagtctgaaccagtaattgcaattcttaaacttagctgaacccatgaaggagttcattaaggagctcatctctagagattttggccagcaactcctggagagttccatgctagtggtccaatgaccgacctcacttgaagaaccactggcctaatttcctactgctgctcttggtctgctttcttctcctaaaatactgcccttcatatgcaatcggaaaacttgattattattcctcctcctcctcctcctcctcttcctcctccttctcttcttcctcctcctcctcctctcctcctccttctcctcttcctcctcttcctcctccttcttctcttcctcctcctcctgttcctcctcctcttcctcttcctgctccttctcctcttcctcctcctcctcttcctccttctcctcttcctcctcctcctcctctcctgctccttctcctcttcctccttcttcttctcttcctccttctcccctcctccttctcctctcctcctccttctcctctcctcctccttctcctctcctcctccttctcctcttcctcctcctcctctcctcctccttctcctcttcctcctcctctcttcctcctcttcctcctccttcttctcttcctccttctcctcttcctcctcctcttcctcctcctcttcctcttcctgctccttctcctcttcctcctccttcttctgttcctccttctcctctcctcctcctcctcctctcctccttctcctctcctcctcctcccctcctccttctcttcctcctcctcttcctcctcctcctccttctcttcttcttctcctctcctcctcttcttcctccttctcctcctcctcttcctcctcctcctctcctcctccttctcctcttcctcttcctcctctcctcctcctcctcctgtcctcttccttctcctccttcttctcctcctcctcctccttcttcttccttttcttcttcttcttctcttccctcttcttttttcaagacaggatctcactctgtcacctaggctggagtgtggtagcataatcatagctcactgtagcctcaaactcctgggctcaagtgatactccagcctcgtctcagcctcccaagtaactgggactataagtgccatgtctggctaatatttttattttttgtagagatggggtctcactatattgcccaggcaggtctggaactcctggacttaagagatcctctcacttggctgaccaccttgcccagccaaaaaacttgattcttacatctccactgtcttctccatactgtagtctctaattctgtcaagatggtacttttgatagtttttgactgagaaaacacatcaaggtaagaactactatgaattcagcaaagcttttaaatttaaattcctacacatctgtgtatgtttgaaaagtggtaatatgaatgcaagacaaggctgtttattcagagtagtataatgcttggtgtacacatggattcatggatccctttctagaattctagaattccaggctgctcttccctcacccaggacccatggtccaagggtcgggaacagggatctaaatcaatggttcttcaccctgaggtcatgacacagtggtacatccagagcagctggatagtgatagcaaataatttattactgagagctgaaattccaaagtttgtgaatagtttctttaaaaaataaaacaaattaatattgtccttgtaacataatagcatcactctgtcacttgcattacaaaatgcttctatgaatgggtgagatccgggtggacttacaactcatccatgatgcctgaagggagcagatgtctttgatatatcattatgaggaaaatgaattatttacatactgacattttttgtgttttgtcaaaatctgagaacaccttagggagtatgctacatgtatgaagatcattcatcctcttgttgagaacaccttagggaatgtgctacatgtatgaatatcattcatcctattgtttcaagacaaaaaaaaggccaggaagcctgtactagactgtaagaaaattactttatagaaaagattgaggaagacaagattcctgctcattgaaaacagtggggcacacgcatggccggaatctttgtcatctttgagtaaatgccccagtacggtgggccttccagcctcatgatggattgggttcttccacctgtggctcttggtgctgcccagattcaatatccagtttttctactctttgtcagcccagtctgacatattctgtggggtgggagaagggctccagacagattcaatccggacgtgataccagtttactgattgcatctcatttttgacacacttggttttcaagtgcagtgaggcccctctagcacttgctgtttcccctctcacaccttcaatccctctttatttctcctgctgctcctcccctgcagctcccttcccaggccttgaaatgggagctggggctgattcagcacagacagattggctcataaatcttggccacatatgggccccacagagctccaggtgagagccgttagcacatctcccaggctcgaaatgtctccatgtccctaccagcatctggccttgagcagcagatccagccccacaccttcccagctcttccatcaccttctagcccccactcttctcaggccccctggagcctctgagctcattgagggccattattaaggaagtctgtttggcagatgcccagttccctggcaggggtctgtggcaaaggtagctcagactccagagcctgcaatgtggctgtcaacacaatgggtggttctcctttggtatgggaatggactggtgtcacctactaggagaaagattaaaaagatgcaggtgaggatgactccctagccctgacacaactgtggttggaggggccaactaggtgacactgagtagccccgtggcccagaagctcagagaagcatgctgctaaggccatccccaggtccaggccagaccaccttgcccgcttgaccaggttacactccccatgcaggttccgttcttaatgtgaccgagacatctgctgcaaacagagaagacaagacctttgaacttgttaactaagtcagcccttgcctcaaaagtgaaaccacaaaatggtcttcccagcctgctagaatggacgggagcaggggcaggtaccagtagaaactgaaccggtagttgaggccttggggcccaggttgtcccagaccaaaatactctagaattctgcttgactcctcctggcccagcccagcatatacggttctgcctctgggcatcctaatccctcccagctctattgtgtcttaaggggctggggctcaatttgacggaagctctgctctgaggacaccccctcctgtgctcacttgctggatggattctacctgcttccccaggtggcctcagccaattctcactcctcttcactccattgcctcccatgaagccccagccacacagattcaccacaggggactgctttataactgctcttttaacaatagatcacttgccaccgaaactaagaatttttttttagccttcaggatgagaacattttgggcaggtatcaaactcagttatgaccttctctggaacacagagagaatagggtggaacatttgcagagcatccgaaagtggtgggtactgttattttgaagatctcttatttatggcaagctcaatgctctgctctatacctagaataaaggtaaaggacctggccctgagctctttgaagcaaaaggttcatgagatgaaagttccagttcaaggaaggctcgggtcactttatattatagaagaggaggaagaattccacagagccccaaacccagagacagacctagagacggggaaacaaatggagataaaaggatttctgaacagatggtggtaacttaaatcaggagaggcagagggaaaaggtaacagaagtgacatggtggtcggcaagtgagagagcttaaagggaggctgggagtaggaaggtagagggaaggagagaatttaggtggcagagaacttgatgtgatgaaaagccctcagatgtgctgtacttttaaggataaaacagggagccgagtgggtcagatgggggatggggtgagcagggacgcacagtttggagagaatgattccagcagctggagaatgggaaaggaaagttgatgccaatgatggcgacgcaggcagagtgtctggggggtgatctagagctggacaccggcacccgggtgctgtagagcccacagtactgaatgtgagcttgtgggcatgtgtgtgcactgctctgatgagagagtgcttcatttttatgcttttccatgaggcctgtgaccaaaagacatgaagtgctttgctctgctgctgctcgcttctctccaaagctcttgcctttttggtgtgtgagcgtgtgtatctcatatttttgaccaatgaggaaaaaagcttcagctgattgtgaatgtgccattaacccctctagtttaccaacagtgaatcttcctaaaaaagatggtgattctaggataggaggccatcatccaatcttcaggccatagctgtgcgagccatcagaccacattaagaggagggagtgtgaggacctgcaggaccgccagctgtttatttaagtggtttcacgtcaccctacccacctcaaaggctgccacctggacacctccaaatcccatccatatcagtgatagtgagcccccaccctcaacctgctaccagccaaggcctgccagtctccagaattcagcccatctcctctgaaccctatcagcattctttgccacatcatcatttcagcaattcctttgtctcatcttctagatgagcatataaaacatccctgataatttgcacgttaggaatggaagccttctgctcagcaagctgagcacccctcgtgatgccaggccctgggcagcagcctgccccctttatcctgctgcaaaggaaaggaaaggacaggtggcaggcctgcctcgggcccaaccccatctttctctctgttgaatgggaagcaacagtaggctgaagacaaacagcacaaacaaccatatctctgtctgtctgtctgtctgagccatgttttaactgtgttactggtccccaggacagtgtctttcccctcaggtgtttttcatgtagacagtaggctggtgccaattcatcttttaaacagaggctgacctgtgccctcaaaactgggaccagtgaatttgagaatgtgagttcttccccaaaggtgacacatgttcacagtgatctggaaatcctactcccaaggtttgctcaagccacagaaaccgttttctgtaggacatattgatacatattagtttgatgcatggtctggcaatggaacagtcaggaatctcagaaaatccctccccatggatgtagggaagctatgggaataggaaggctatgggagcaggggcaggcagccacttctcactgtttggcaaagtgtgttcaacttaagtgcacacgcacacaaacacacatgcacagaagcacccatgcacctccatggccccttgcctttccctccaggaagtaccaatgtgtcatatgaatagtaaggttcattcattcactgaacaaaatgtttgctcatcacctgctttgggccaggcactgttctaagctccaaggatataaatgtaacagatgggttccttctcccatggcctcacattctggcgagggcaagcagacaataagcaaagaagtaattattcttttttttttttttttgagacggagtctcgctctgtcgcccaggctggagtgcagtggcgcgatctcggctcactgcaagctccgcctcccgggttcacgccattctcctgcctcagcctcccgagtagctgggactacaggcgcccgctaccacacccggctaattttttgtatttttagtagagacggggtttcaccgtgttagccaggatggtctcgatctcctgacctcgtgatccgcccgcctcggcctcccaaagtgctgggattacaggcgtgagccaccgcgcccggccagaagtaattattctttgagagtaatgagggatagagcggtggccaggggagatgtgaggcctgaaggagctgaaggggtgagctccactgacgtctgccaaagaacctgcggacggacagcagcatggccttggtcaggcaggagcatgtgtaggagttggagaaagtgagggggcccgaggaaggggagtgcagctggctggtccctgaggctctgggcccagaatctacagcctctgctaggcctttgggaggactctggctttgacccagaggagaaggggaggtgactgaagcaagactgaggcttcgtgggcctcacctcatagcaacacccgctgctgctgcagcttggacatcagctgcccggagcgggggtccaggcagtgaggatgaggaggcggtgggaagtggccaaagtcaggactcattttgaagatggcgcagaaggatttgctgatgcagagtgtgagagagccaggaagatgactccgaggactttgccttgagccaaaagctatggttctcatttccttgagacggggaaggtgatgggtgggaagcaggagctccatcagagcacgaacccggtgttgtgcagcttggactttcccagacgccccaggggttgagggaggcaggggcggcagggagagtgggcagagggtgctcctccagacacagctctgtgtccctgcccacgtccttgcctttggccttcgctctaggagatccctgctagtttccatgctccatctctgccttcccaggagtgttctcccctcttagagactggatctgttcctgggccacagcctcctcctccctggagccccaagcattctgaggggctcccaggtcaggagggcccccccacctcaccatccctctctgctcctcatctggggcctcccccagactttcttgctgacggcacctggccctctccctctgcagccatgacctgcttgtcaggctcccgttggtccccatggctgtcagacatacctgggtctcaggtataatcccagttgcagttatttcccacatgcctctttacttcatgaaaacgaaggctccaaccttccatgaccattaaggcttttccagaatcttccatgacagttgagcgcacagaggatctctagaggatttgtgacttcagtgcacatgcggacactcttccctcggatacagctggaaattcttgttataaatatgcttaaagttgctggttcccaactcccagtgtattggcaggtgttggactggtcgcctgaggattaccccagccccagagtcagccccagagtcagagattagggtttcatggtgcaagggagggacctgggaatcaggatttaggaaatgctaacacacccctactggtattgttgttgttctattattaattaattaattaatattttaggacagggtctcactccgtcacccaggatgaagggcaatggtgcaaacatagctcactgcagcctcaaactcctgggctcaagtgatccttccatctcagtctccccagtaggtgggactacaggcatgcaccaccacacccagctaattttttaattttttaaagatgaggtctcacactgctgcccaagctggtctcaaactcctggcctcaagcagtcctcctgccttgacctcctaaagtgacaatcctcccaaagggggttataggcatgagccaccaccatgcccagccacctctactgatgttgatcaccgggcaggcttgggaaaactgctttagctgtaagaggggagggtgttctacccccagagaggttctcttactttttcctttaagcagatcactacagcctctagcctgcaggggctccaggcagtccatcacacatactgggttgtacagaatttatataaggacagagttgggaagctggagggggacaaaaccctgcaatcttctgccgtctaaaatttagagcctattttggtgagacaagactgtatagaacagatacaaatagatgtatattaatattctgcaacagagggggtatggctggcaggcaaaatagaagtaaggaaaagctggatttgtggaggccaaaggtgccctcgaggctgcaggttggtaaagagttcatgttgccatccaaactatgacccctctgcttctgtcccttggtgtggaaccattctctgcagagatgagcccaggctgtggctgcaatgggagtggcttgcatgtcactcactgaagcagcaaaagcaatccactgtctggattggtgatgagctgggaatctctcaagggagtgacctaggaggcaggtgggccagagggggccagagggaaatgagattgttctgttcttgctcttgctccctcagggccatgtccttttgccatggtgcacttcctggtcctgagctgaccctcacacaggtgcccaccctgcatccagcagtcattagtaggttccccctcccactttgtcatgagaaagggattttcccaggatcgctgtatttatagtggagagaggccccaggactgtaaggagtggggacctcctccccaggaatcccactgaaagcccatgtcccctcaggaccgagctcctgcccactcagaggactcgtgctttgagctgccccagtgggtgtgacaggtttgctataatctaggatttcccagactcacctgctgatcagaatcctgtaggatgcttgttagaaacaaagatatctgggccccaaactacagctaatgaatcacaatctcaagaggaaaggcccttaaagaaacaattcttaggacagcgtaaacttgggaaaccaccaagccatgaactctctcttacccgtgggtgacctaattcctgcctctgctagaaggctgctgcctataggctgagctcagactggcattcatggtgggggaaaaaaagctttctttctgtttagagaccaacagtgacaacaatgattaccaacctttatcaactatgtgccaggcactctacagggggctctttggggaaaggtggatcatgtcacgcaatcctgccatagcctaatgaagcaagggctacaacaatctccatttttttgatggggatgcagaaggcagggaagtgaaatgtcttgcccagaggcacatgcagcaggtagccggcagagctaggtcgcgggcttctgaccactgtccccctctcttccccaacagattaatcatcttgagaccttgaattaactccctccagggtggcaactcacaccaccaccaacacgcatcccccacgggcagggaaaaagagcatagagtggcagctcctctgagaacctgcagtgggcagttgtgagaatgaggcacgatggggaggacagcaaggggcagagtgctgacctccctcctgttggctctcaggtactggaactccttgagcaacctggtggcatccttgctgaactctgtgcgctccatcgcctccctgctccttctcctcttcctcttcatcatcatcttctccctcctggggatgcagctctttggaggaaagttcaactttgatgagatgcagacccggaggagcacattcgataacttcccccagtccctcctcactgtgtttcaggtatggactcttctctgctgggattcggactcggggtggttgagtggcggggtggtgggaggagtgtgggaagctgcacccttttaccgggcagccacagccatcctagatcagccctggagagcccatgcccgggagagtcttgagttttttctgtagtttccctgtccccatctgccatggaattccactagtgggtggaccattaggggaaacaatataagtggtttaaaaatgccttctcaggagaatctcttgaacccaggaggcagaggttgcagtgagccaagattgcaccactgcacactctagcctaggtgacggagcaagactccgtctcaaataaaaaaaaaaaaaatcgttcttatccatggaatcctttacttaaattctccatgaaagcccaaaacataaagaaaagcagactgctcttactgggggaggggagggtgacgaaaccctggctttcctaccatgcttgtctcttgaaaaaaatattactagcccatcaaatttgtgatttcatagatattttggcttagggcaaactcaaagtggcatctatttaagtttaaaagcagatcgattgagaggtaaaaatgaatcacatgtagatgttgtcaaagtcttgaagatgatgccccagtgacgaatgtttggggaaagctggtgtagcctgtggctgtctcagcaaacacacaactgcaaaagggtcctgacgccttacccccaggaatggctgacggtcagctcaagcatgtgtggggaaagtcagagatctttgggccaaaaagcccttttagtcacccttcaaataatattatgccaatagccaggcattttgtctaaggacagttcaatagctcagagcccctggggaggagaattgggggccaggaggagggaaagaagtgaaagggaaattttggacaattttgttgacgtagtggggcagggcagggtggttttgggtttgctgttggtctaacgctgtgtcccttattggtgggaatgtgtcattcagatcctgaccggggaggactggaattcggtgatgtatgatgggatcatggcttatggcggcccctcttttccagggatgttagtctgtatttacttcatcatcctcttcatctgtggaaactgtatcctttgctgctgccccccacccctgcggcccccagcccccagcctgcagcacagtgccaaacgggcacgcccctcaggtccgggcggtcctgctcgggctcacaccacccagcctagaaccccatggcggcggaggtgggtctgggtggaaacctgcagctttggcatgggtgaggttcaccttcctgaaccctccgggcccgcagcggcgccgcgctccgggcgggctgtcgccgtaatctgggtgagcggcgccccctggcgttgcggcgtgtgcggccactcacaccgcctgcgatagggacgcgcgggagcgggccggctgccctggggccgcggcgtctgctcagaggcgggacgctccgggagggaggatgagccgttgtccttcaagtgaccttcagctctcctcctgctttttggtcagcagccctctctctgatgctgctctccaggactttagtcacgggcagagctgcacagacttcaaacagccccaaaagctccttcctgatcccggctggggcaggtttccagggcacaagccacgggtgctgcttctcttccccagctcataaccccgagagagtcacgtccagagccaggggtaacataggaacagctctgggccaagtcccagctaaggcagtgcagaaaacacagtcatggaagcctgcagacaaggtttcctcttttcccagctggatgacctcttgcagattgaaggtcctctacctcagtgtctgtaaaatgtggcaatggaatcatagaacctactacataaagggtcgttgggagttttcatgggatcatgcatgcaaggcctctgccacattcagaagccaccctggacaaagcccctcttccccagcctgggttgctgcggcttccctgtgtgtgaaatgatatgaatgtctgggtgcctggggccgggggtcagacttcacagacttaaagcccccttccagctatgctttcgttgattctgcagttctctgacccacagtgtttctgttggtggagtggggaggagaaagggcaaagaactgtctccactgggaactcccaagccttggctggctccagatggaccctccaagggtcttcgtgggtgcaggctcacattaagagttggcagagataccaagccaccccctcagcgcccagttataataaaccgctcttaagagcgttctgcatcctgctagagacaatgctgtttataatgtcaattacagccagtcatctcagcagggaaagcaatcatgaaacccagcaattaaagtgcaaggcagggcttgctgcctccctcccgcctgctccagtgtgcaggctagcctgttctcatccctcttgatagctccaggtagctaggagggtgatggggaggaaggggaggggaggaacactgttggggtctgactccctcaaattgcttccccctcaagctctctctgctgaggagctctaccctgcacgccccacatcccccgtgcccctgtgcccaccaaaaccccaaaccaagggtcattttctttaagaatggacacaaacagatatcctactgaatgtgttcttggccattgctgtggacaacctggctgatgctgagagcctcacatctgcccaaaaggaggaggaagaggagaaggagagaaagaagctggccaggtaaccctctaagcttgcccaggcctggggctccagggctcccattgtggaatgtcttcccactggtggcagagagaggcttgactgctagcctctgttggctctccctcctaggaggactctgggtttggggcttcctaagttgggcctctctcctaattcctaagcatcactctggtagggaccatcatgaattataataatctctgcaatggtgtcatattctccacctgctgggattatcttttgagaagctgtgataggtggcaggagtgtagggtggggagagagaaaggtaaccactcagttgggaaacgcagctccagcttacagagggagtcctcctcactactttataattcatctccagtgttaggaaggcaagacggggccctatgttgtatcctatcattatctagacgggacagttccaggccacacagctgccgggcactgagcagagctcctccaggagccaatcctagatgagatccaccatccttttctgctttggcgacccaggcatctctggagctgcaagaggccaattgcgtgtcaggcagagcaggtgtagctcagccccatagcacttgtgactgagctgcacacgagaagcgtcctggagaaaggaagatggactcagacccaggggatctgtcccctctggccccaacaggccacagggcggttccctcctacactgttccctatcactccagtaaacagccatttatttttttctgctgctgactggccaggactgccagcccagagaagaaacaagagttggtggagaagccggcagtgggggaatccaaggaggagaagattgagctgaaatccatcacggctgacggagagtctccacccgccaccaaggtgaggagctgtctccttcctggagctgtgaggccggtgctggggagggagggccacagccttcccaggccagaaccctgtggagaagaggagagaaagaaagacacccagtggaaagaaagccagtggggatgaacaggagagctgggagggggaagataaggcagattggctggatcccagccatctgctgatgtcttgaaggagatatgcaaagtgacaagtacctatttttgagctaagtcactgactaaaatgcaacttcaaggctactgcaagcctcttaacttggggacgtatctaactattcttcccccttctcccctgtgactgtctagatcaacatggatgacctccagcccaatgaaaatgaggataagagcccctaccccaacccagaaactacaggtaccagtcccactgcctaacctgggattgggagattgggggcagagatctaaattctaaagccacgtgggagtggccatatattagggaccatggttccagtgtccctctgtaagtaccttccactgctgagtgtcttctatctctatatttaagcatcatcagtcagcatctgggaggcaggtttgtttctggtttcctcataatgagatcacatttgagcagtgcttttgtgtcctttccaagttggattcagtgtacatttaaatttttgttacattacatgttgtaaaatcatcattaatttatataatgtattagtatggcatatgttgcaacattatgctcacttaatattaatagtcaatcccaagtctgccttgcccctactcaggaggcagtgccgagtgcagggacagctgccaccacagatgtcccacttgttgctttaggcaatgatttcaggtctcattataaaaggcgcgcttactgactccatctttttatgcttctatctgatacctaaattggcaggcagtctgcttctcaagagctttaatgtcagagatcagaggtcctccctccaggcttcacttccctgctccctgaaatcccataccctgtgcaaggcctgggcttgccttcctctgacctaggattgcagatattatcgccagtttcaagcttgaagtcaataacatgctatcaagggactgttgattttactgacatttccttgttcctgtaggttaggctatatttgggttgttcaccaagttaggtggctgagaacctcctacatttatgagcaaagctcggtttccctttttgctttccctccgctggttctctgcttagaacactcacaggcatccttgggaaccagactccctgtggtcacaccatcctcactcccctcctcctgcaagggaataggatgtggtttcctggagcttggatagaaagaacaggaagggcgttttcatatgcccggcattaaggctttgaagttcttaaaaccccttctagggtgaaaccgttagggaatttcaacgacgtactagaattattgaacaaatgcaatgggaggatcttgccttgatcctgaagcaacaaatacactttaaaatgacgttttagagggaaatgggggaaattgaatatggactgggaactaaatgattgaaagtagttttgttaatcttgttggtataatattttgtagttctgtttttaaactgctgcagtgtttatggccagagtctaaatgtttacgagttgctttgcttttaaaatattccaacaaaaaaaaaatggggacagagaagataaatggaacaagattagcaaaatgtccaaagttgttgaagctggttatatatatgaggtttagtatgtgagactgtactcttgtgtaaatctttaaggtttaaaatgaaagacagtaataaaacaaattccttagagccctgagaagagccctcccatggggccagcctccaggatgggcctccctgcacacacaacagggcagatctagcatgagggtcttttcacacaggcacccagctgcagccaggcctgtacggcagatacacctcttgcatcttcaacaaaaatctcaaattctattaatctatactcttggcttttcttttctttgttgctctaatgaaatcaaagagaagaatgttaattttaaaaaaaaagggctaatgaggattttgtcaccaggtcggccatcctagaaatgcctctcacgtagctacccagtggctctgaggactgggggatgcttacgctttccagctgaaaagctcttcccaccctctgctgaggcctcaggattcttgagatttttgagtgtacggcccgctccccgtcatttctgttggttacatgtgtctctttactttcgtgttgagacctctggtccataccctgaggctgccctgactgccccaccacgtacaccagccaccactccggcctctgaagccagccccaagcatgcccatttgtgcactatccctggtttccaggtcctcatccaggaggtccaaagggcagcatgctcttaaagctggtggccccacacatcactctgcccccaaaggctaagttagcttgtgcttcccagctcttcctgccttcccatttcctcccttccctgcctccacagtcagctcctggatcctttagtgccaggtgcagcagaagttcccagagactcctccgaagatcacgtggcctgttgtctctgttctggtcaatctctggttccttcctgcttcttgttctcccgaaccacgaatggcaaagatcctgatctaccattgtgctcccaaccgctgccccttccaggccgctggcccctgccatgcctggttcatgcaggtaccccttagcaggcagcactggtgagtgtccctcctgctctgccttcagccagaccactagggagaaagggccggtgtcagggagcacactgccatgctctcctgctccctccctgtctctctcttgccctgtctcctaggcttgccccctgccctctccctctctcctgggctgtccagattgcacccaaagtgatgtatcagagtggccaagtgggagctggactccagagtgcactctgctggctgcagcttcaattaccctcgcatgaccgcgaatactcagaggaggggcctgtttctaattcaacaaggggccatcgaggccagccatggccctagaatccttccctctctgtttcatctgaaaagctcgccagctgctttcaacctcccagatcggtataccctaattatagagaaaaacccaactcactgaaaaggaaagcattgtgcccagatgagtggaagctaattctacttttgtttaatttattaatttatttgagtgagcatgcagatgtttgcaagagccactaaggacttaaagttaacaggtacacactaaaaaaaaaggagtgccaccagacactgagtagtcagcaccgcctgtgctgggggaggctttcattgctgcagagggttcaaggacaaggagagccatgaggtggtggagtctgggggcttcatgcagaagggtggtcttgactgagctttgagtcagggagttggagaggctgaaggagttttttcaggatcgtacaatcatcagagatgctgagagttgggaggaaccttgtagatattcatgaactactcatgaagcatttaatgtgtgccaggcactgtgctaggtaccagggacatgggggtccttgttgtgggcaaacagggaagacccccaccctcctggaactgacatatcagtggggagacaggcagcagacaaaccaaccaaaaaggtgacatcacatgatgtgaagatagtaaaatcaaggattgtgttaggggatactcaggggtcaggctgctttgactgtgtggtcagcaaaggcttctctgaggacacagcatttgactggaacctgaaggattcaaaagaactagacatggaatcggagcgaagagctctctaggtggagaccctgagtgcagagtctcttacagggatgcacttggctgtggggactccaaagagggccagtgtgcctgcagcagagagaaccaagggatagtgccctgaggcgagaggccggggcagggcaggagggcagggcagaaggcgcagggccatgcgggaggctgggtctgatccagtgccctagagggccaccagaacgtctgagcagaggaggccctgacctgatgtccgactcaccctttcagagattccctctgagcggtgtgaataaagagcagtggtgttcgagagcagaatgggggcagggaggatacttgcgcagtatccaggcagagaggatggcagcttggacaggggatggtgccggagatgcagagaagtggtcaggcttggggtacattttgcaggtaggaccagctggattcactcacagcttagatgttggagagagggaaagagaaatgtagggtgattctgaggttttctaattgagccagcgaagagaaaatccccaatgcagaaactgtatccaccacctgtgctccttgtgccccaaggcactgctccgggtgtctggcccttaccaaccaggcactcccttcagctggtagcagactcttgcgccctgctagaaactaagctccttgaggacaagaaccatggctttgtcttctcagccttgggctcaatactctgtaggcactagatcctacaaatgtctttactttatgtggccaagagcaaaatcacagaagtgaggatgagcatcagatggaggggggcaagggttgccaaggaccaagggtggggctttgagtgctaccctggttttactttggaatcctctgacctgccttctgaaatgcagcagcaactccagcgtgcagcagcacctcacttccgatgcttttttccaaacctccaagaacaaaaattagaaaagaaagatccctaatgtattctactggcatttgggagtaggaggctaggtggttcagttgccaaccccaaaatgagccttgcctgactttccctgatctgtcagcatccctcctcatccataatacctgctaagcatcacgtgctgtcaaagttgtgttcctttacaaatctgagtttgtccttcagaaatcgtttcctcttaagtactgtgcctgaggttcagctgctgtgtgtctgaatggaccagctaacttgcttctccccaggaatggagctcagcatggagcttcataaacgggggggagctcgtgcagatgtaagagcctgcaccgttttccattaggaagttcgaatggcacaaagctatagtaaatatgggtttctgtaaacacaaatgattaaaataagcataaaattacctgttatcaaattatcatgaagaagaaagtgttgggtcatttcgagcaaaactgaaaagaatacaaacacctaggcaggaatttaagatccttctcaattaaatttcacttgaaataccatgatttaggccaattctggttttacttattcgactttaagtagaagacttttcttttacataccaagggttgggtgtcacaagaactccaactcttgtcctgtagacagtttttcatcttgggcctctcttctgctgaaaaaatattaattgtcttgctggtcagctctaattaccctagggaaagaatctgattgatgtctgtatggtactggccctccaaaaaagccttgggtccctaaatgcttgaatgctttttgcttgataaagaattgctttctgtgccaggcattttttttttctttgcagtacctggctttgtttgaaccagaagagggagaacatgcagaggcacagctgtgtccatgagacgagcatcccataactatctttctccagccagactagtatccccttcaccttcatcttatacagagtccccttccttctgaccggtgtggaagttcaatcatcatcaagaaataagggcttctagtgccaggcaaagcttttctttccagggttttcagcacatagggagaagggacagacatttaaaatcagtcatcaaggtactggaggcagaggttctgctgggatccatggaaaggtcattccctggagcgtgagtactcaggaaagttggaaggaggatgctatctggattgggggtccttgtgtgctctgcagagagggagatgaagcgcagctcaaacagagagagagagagcatgaggaaggacggagcacacagtgagcttgtcagctcactagggctgccataaccagtgaccacacactgggcagcttaaacagcagaaatgcatccttttacagttctagaggctggaagtccaaaatcaaggggtctgcagggccaagcgccttctgaaaggctcttgggaagaatcctcacttgcctctcctaacttcttgtggttgccggcagtccttggcttgtagatgcatccctccaatctctgcctctgtcttcacatggccttcttccctaagtgtgtttttgtgtctctgtgcctgtcttgatgaggataacagtcattacatttagggcccatcctagcgcagaataacttcttcataaccaattacatctgcaaaggccatatttccaaataaggtcacattgcaaagttctaggtaggcatgagtttgcgggggaaactgttcaacccactgtagtgaagtgctcagaaaatagtttcgtgtgagtggacagtttgttagggaataataggtggtaaggatctgactgagaaagatgttgagcattaatttacaggcttcgagtctgtcccataggtagaggttgtaataaaagcagcaaacacttacttacagagcggctgctatgtgccaggcaccgttctgaggtatagaggtactgttattattattccaccttagatggagaaactgaggcacagagagactcaataaaatgcccacggctagaaagaaacagagccaggattctggtccaggcgattggctggagagtctgctcttcactcccatgttgttactttcccctctgagcatcttcaacacatttgagcagcccaggatgggcagtgcttcccgtcatgagcgttgtgctggcaagcacaggaataagctgtctgactttggtccacattaaatgtggccactggctgggagaacgaaggcgcttctttaattggtgtcagtgtctaaacctttgcatgaagggcctgctgtggtcagtagtattgccctgttatctcgacagcacatgaatttttttttttttttttttttagttgcagaaattgggaaagtgttggtttctaattcctggaacttccaagagtgaggttatttgcaagggattccacaagccaactcagccataccctttccccaacctgcggcctagatagatgagtaacacctggcagtgccctgtcctacctggtcaccttttttcataccttacaactaggatgaccaacgaccccagtttgcccagaactagggggtttcctgggatgtgggaattttagttttaaaaccagaacaagttggtcgccctacttacaatcccccttattgtgcactgccagatacgacttctccagcagagatgagctgcagcagcacccacagggagacagcagaatgtctgtcttggttggtaccctacattttcagagccataatcatgtctgccagtaggaaggtctctgaaagtggtaaaataagtgggagtgctggagttatttagaatggtgctgttcttcttacaggagaagaggatgaggaggagccagagatgcctgtcggccctcgcccacgaccactctctgagcttcaccttaaggaaaaggcagtgcccatgccagaagccagcgcgtttttcatcttcagctctaacaacaggtgtgcagcaatggtggggaaggtggggtcctgctctctctagtaccagcctggcagttgcctgtattttacctgaacctctggatggagactgagactctcccagctccttgcaaattgtataaacaggcactcatttagggaagagtcctggattttgaatcagaagacttgtgtttatttttctctccactttttgaaatgtttaaactctatttctattctttgggtgattacccttgataatttactaattctatttaacttaacaaaatgtgatgttaaacaatatcaagaacctcctcctgtataatagagtgaccttagactattttaactcactcatctgctccttacttacatggaattgtcgttagtattttagtccaacttttatttttaatccaacaagttagtgagtcttactgttatatagatactgtgtgtttggatatatgtacaccttaccattttatttgttcaccatttttttactcatttcagtccatcctttagctagcattttctttcttcctaaagtacattctttagaggctcctttagttccgtaatggcaaattcagtgggcctctacttacctataactgtttcacttcttgctcttgaaagatagttttgctgtgtacacgattttagacagacaatttttgtcctgcagcacaagaaaggtgttattccactgtaaagtcagctgtcattccaactatggtttctttgtgagtaacctaacgtttatttgtagctgcttttaacatattctgttgcctttgtggttgtacagatttactaccatgtgtcaaggtgtggatttctttccatttgtcttgcttagaatacattctgcttcctaagcctatgtatttagatttttattcagttattgaaaaagtacagccataatgtttaaatattgcttctttttaattctatatttcttccttctgacactccaattggacatctgttagacattttcattctgtcctccctgtttcttagagggtcttacatatctttcatctccttgtctttctgtattctgggaaatttcttcaactgtatcttccagtttcttaattctattttcaacttaatctatattactgtttaaaccaattttttatcttgaccattatatgtttttgtttcagtcagttccatttgttgcttgattttccagatccatctctaaatctagtagtttctatcaattcctcatctttgtgatttagtcctttatttcattaaatatttcaaatatagttgttttatagtctatatctaatatttccaatacctccagtctttggaatctaaatcacttatccagtgtttcttcagatttcccatcttaggggcttgtccttttgtgcatctgatgatctttgattgtgaccccaacacttcctcttcatttgtgagagtcctgaagacctaaagtaggtctggggagactttcttccagatgccccttggaggtgttggcttggcctaaaattcccaggctttcctgccccacctcaagactggcttaacctgcaatttcttgacagcactgctgttattggcttccatcttcaagcaattctgccctcctggctggctctctctccatacgtagcctcagctcagtggaggttggtgggaggggttgttggtttgaagcagatgattcttacagccatctcctaactcttataaaccagaattgtctgagagagtttggcccttcgagggtttggtgcttctgcagcaggagggcttctcagagcatttagtcaaccataatgccaggagcagaagtctgaaggcctgggttgaagccctgactctcccacactaaggctgtgtttctgggcaagcctctcctacttgggtttcagtgttcttacctgtgaaatgaagatgatgacacccatcccttccttcctacattgctgtcaagatgagatggtgtacaagacactttggcatttaggaacctagcatttttggtgctatcactgagtgcctagaagctcagttgggtaattgtgctggggcatggaagtgaattgcacatttaaagctattacacaggagcagatcacctacagagagccggtttggctggcctctcagcatacccagctccgggtagtcctattgtgccttatgcataagcatagagttgatctcataaagtgatttcttttcaatgatagggaaaataagtccccaaacaaaagccagttatgaatgtcagagcaggatttgggaattcagagattctcaaaggtctcagatgtaaccttctaaaatatcaaagatgatatgtgcaccatgggggtgagcagttgtcattaccaagcagcagtaagacttcagaatgaagaggtcacttcaggccaacaagcacctgttgccagctgctggggagagctgaggagaggggctcccaagagccgactggtgcttccccttgtctgccttgacttgtctctcctcctgtcccctctcccgtacaggtttcgcctccagtgccaccgcattgtcaatgacacgatcttcaccaacctgatcctcttcttcattctgctcagcagcatttccctggctgctgaggacccggtccagcacacctccttcaggaaccatgtatgcatcgcctgtgtcttctgcactccttccccctggggctgtgccaggcccacagcttctgttgctgacatcattgttcaatcaggagcccaattctaggtgtcataattagatccacaactaacatttcattaagagagtagggctttgatagaaaaccaccctaggaccacaagcaaataaaagagcatgtacccaaatgctcaggctggtttgataattggcaaagatcaggactttcattgcctgtggatgttccccaggaagctctagttccctgcaaacttagtaaaatgtggccactgactacatgccctcccttgctcccagcatgctctgaccagaaggggagcattggcaaataggtgccaatgatatggctgaccttacctaaaagagagtcttggtacctttggtagagtagaaccaaatgtgaggacccacccaaggctctggtgaacaatattaaaggccagtttaagaattgctctatctcaaaacctcaaaactttgtcaagtcccaaccaagtgggcatgaagacagcccgctgatctaaagccatacccatgccaaaccactctgcgctcctggggcctgcttggtccagggctgtcttaccgaggttagcaggtgttggccccatccctgatccatcacctgaaatataataagtatgcagtcctggagccggtcctcagcctgtgcagacctcacctgaaggatgcacctcccttgccccagaggacataacccaggaatagatgtccaccatcacaggaagctggccagctcagtcccaccaacgtgagcgaagcattttgaatctccctgcaaaaagacaaaccccattctctgtccttttgacaagtatcttagtggtctgatttgggtttgtaagtaaattggattaatgggaaaagcatccaaccagatgctgctcagatccagtaccagctgaggcatgccctggaagctcacctcacttatctgggggcttcaagggaagccgctgtgctgcctgaggctagccccgcctcaggatgtctgtgtgtgtgccgcttgccccccatgtccatctgtgtccctgtgcaaaggcttaagtgccaggcatctcattttgaagtgtggccccttttctggtgaacatccactgacctctcttcccgtcctgcttttctcccttccccatcccatccccaccctgttcctttttgttttgcagattctgttttattttgatattgtttttaccaccattttcaccattgaaattgctctgaaggtaaagcccccatccccttctgctcctcctgtcccccttgtgccagcaccaggtctctgccgctgtctgtcgctaacacacatgctccttcctgttggtgtggggttcactctcagagccactaatccaattatgcttatttttcagatcctaggcaatgcagactatgtcttcactagtatctttacattagaaattatccttaaggtaatgcaacctgggcaatgcatcctctgtcgctttctttgtctatctctgctctgtgtggctggatcttttgtcttttctgtttctttcactctctcttttctttactcccaagcctgaaattggaaaaatgagtgcccctcactttgtgtgatgcactttgcccagacttagaagccaggagcagcctaccccaccacagctcctccctccagccacccctaagcagtccgtggcctggaagggacacgtgttggctgtgccaacattaaggctgccatttcactggttggggctgcagccgtcagcagcgccagacatacatgcccacatgcaccagctccggttaactgatacctgagcccacgtaggactctccttccctcctcctgcttcatacactctgaaagtgggaaacctcctggggcgtgaaagaatcacttgagctactctctttggatgcccatccttagcaccttcctcagtacttgcagcagatattgggtctaagctggagttggggctgtgtcacagtgatcacaggcctactgtgagatgtggagctggtctcccagctgagggcttttagcagggccattacagactactgccgaccctcagtcacctgctgcaaagctttgtcacagtgccccttgccctgagcgtgggggagggagaattgtgctggagagctgagtacagcaggatgagagcaggtgccgcaaggaacctgagcacccagcccccagcccccagcccttgcctgctgctggcccagctcagttctgctaagggaactgctgcaacattgctaccctcagaacaggcagagcccacctcagggcaacactgggatgagagaaagagtattcctccatttttcgggtatatttctgagtctctaaaccaatgcgtggcaagccagttcatctgagagtcagggtgtgagttccatgacctcagggaacgtgtgctcctctctgagcaagggggtagattctaccctttccccaaacagaaggactaaggctctgaagcccatgcttcagctttagcttcttcctgggagactagcctgggactccccctcccaaggagtccaggctcccttgtcatcctatcgctgtggccaatgcaagctgaagtccacacctaaccgatgccactgccagctgcaggcctctccttccctgatgagactccctcatcatggcccagcctgttgatggacaggacagttcagtcacatccagatacaaattgaatggggcagtttttatgtgccttcccctgtgtccttgtccccaggacactcaggtgcccccagctgccatccctggttcctgctaaccaagtatgtggctcagatttttcttttctgctcgtggagagtagatctgaccaggccttggttcctggaggtcgggagagggaaccgaaagttgcgtggctgcactaagatgcaccgcggcaaaacctgctttccatggtgagctgctttgcttcccggacttcagatgcagggaggcacacagaccccagagttctttcccaggacaagagacgctctgaggcccaattctcagtgcccttctacagagctgcccttgtggatttcaatggtgctatttctccttcgggattgccatacaagctgaagtgaaaggtctctttgcaagcattgtcatggcaaggtccttccatcccctccctcttctactttcttctatgctcagcatgcttctgaatagaaaccccaatgccggaacactcccctgtacctccttcccactgggtccctcttcccggcctaaggcccggtgtcatgtcatggcacagatgaccgtggctgtccaagggggacatttagcacaaggaacagtggaagggcctggaaatgtttggccttaaaaaggaaaggcttgtaggctcacaacagttggcctgagtcatacaaaggaccgtcacatagaagaggaagaaggcagaatcaagaccaatgagtagaaatcacaaaaaaagacaggtttcatagctagaagagctgcctggagaggcagggatggcccgtggttgaacagagagctttcctacccttccaggcagagctagcgagccacgtcccattcctttccttcctcaggatggaaacaccccagcaagggccccttcccaagtaatggtgtagaattaggaaagcaggaccgaggtggctggcaatcagaaaaaaagggtcaaagaggaacaattagcactgggtacctgagtctggcttttcctgatgccctgaacaccacagatgactttcaagtaaatgctacgttttccccatgtccatttgccctttcttgtacagccactcttcctctggccctgcctggatgcatgttcccaccgcccccacatgcacacacatgcacttgctcaagtgttggtctcatttgagggtccctaaacaaaacaggagcccaaaaccagaggacagagttggcactctgagccttattagtccacccatctgaggaatgcagagtgttctgttagagctcagtagtagcctcagaagatccaagccaggagcaagaagggatcagacccagtgccttcctaacactaaaagcaaggtggctggggaagtactgggctttctgcaggcacaattaatatgaattatgggagcctcctgagtccagtctgtgggggtcccagctcttcaccaagaggcagggaggcaaggcttccagatggtgggccttctagaactatactcccttgcatcttttatgtaatctacccacttctaaaaaccattgcccaacacaggtgcctgagtcctttgggaccccctgctgcaagagataaatggaaagaattaggttgcaagagctatttttgcccatttccctctgtgtttgcttttgaatggctctgcggacactctgccctgggcatgctctgattccaaagagatgaactggaccccagatgaccggggagccttgctccacctctccactgtcggctccacattttccctttggccgatgcttcctgtccgctgcctgtcacagcccttatcctggataaccactggcccttacgcaagtcggcaaaatgagaaaggctgtaaaggtgatttgttgagcacctgcagtgcgcagctttacaccaggctcagagggtggtaataatggccaagtcctgtagcagtcatcgtcatcttgtgtgttctctttttaaaagtttccaaagggctttcacaaagccaggggatagtttcctcaccttttgatgagaaaacagaacttttctcatccaggaagcatccagaattcaaatccaggctgtagtgacagctcacccttttatggggctcaccgtgtgcagggtggcatcctaagtattttacatagaggtacccacttgatgcttacaaccctgtagggtagaccttatcctcatttttccaatgaggaaacagaggcactaagagaatttgagtttcttgctccaggccacaaaaataaaataccacaggtctgggattccagcccaggccgtctggcctcagagcctgtgctcttagccactgagcctcatagcccctctgatcacacaacttttgcccttaaagaactccagatgtagtctagaagcaggacagtagaattgagtttagaatatttggcatcaataataagcaccctttgaggccaggaaggggaggtatgctaattgccagggtcaccactggaacttctcaccaggcaccagggtgaccagctggcctagtttgcctaagactgaggagttttctgggatgcaggatttctgatgataaagcaaatctgggcaaaccaggatggctggtcaccctgctgggcatgccccgccccccaacccacccactcacggcagatgtctggtgctctcagctggcctaaggactcaagcatttggagaggcagtcgggatgtgtgctcccaacccgacagcatcaggaaaggaccctgcaggcccaaagccatggacttgggatgtggaacagtgcgaaattagagtgggatggtggggcccacttgaaagggctttgaatggaggactaaagagcctggcttggcctggcaggtgcaaggagccacccagcagtcctgggctgcgagagtcttgggtggttgtgtgcatggtagcagaactcttttcttggcaccatagcgccgtctttgtccttcctgttccccatggatggtgcttgggacttgcccaagggatgctgtgggaggaaggggtggtgtgaggggtctctgggctagggctagggccactcacactggtgttcctttgtccctccctgcagatgactgcttatggggctttcttgcacaagggttctttctgccggaactacttcaacatcctggacctgctggtggtcagcgtgtccctcatctcctttggcatccagtgagtgggagcccctcagcccacgatgggccatgcagctagcaaggggtgccagagaggacaaccagaccctggagggcctgcctgcagggccaccgcagtgtgatgagagtggggtggggcctccaaagctgtgcatggtggctttgggttcttggttctgtgtcctcagtggtctgatacttggggcacgttgatcaggtgagaatatgtttaattatctgggttttgccatgacaggcagggccaggctcagctattaagaaacggttgtctccaggaccttcctgcctcctccaccacggccccagtgccctaggctgaccttcagcaacccacagtctgccactgccgtgacctcccctgacctggaccctccttctccctttctctcccctctctctccagccaaagcacctcatgtatgagtgtatgtgtgaatgtgtgtatatatatgtctgtgtaagtgtggggtgtatgtgtgcacgtgtgtggatgtgtggggtgtgtgtatatgtggatgtgtgtttgtggctgtgtgtatgtgtgtgtatgtatgtgtttgtgtttgtgtctgcatatgtgtctatggacgtgaatgtatatgtgtatgtatgtgcatatgtatgtgtgagtgcatgtatgtgtgtgactgtgtatatttgtgtcttgtgtgtgtgtgtgtgtgtgtgtgtgtgtgtgtgtgtgtgagtttttcatttcactggtctggggtacagtctgggtgtgagttctaagagctttccaggtgactcccctgtacagccaagcttgcagtcctcgttcaggtgtggaggatctgattaccagtttctaccaagttctaacagctgatagtgtgaatcctacactttaactttcaaagcacttccacatacacattcttctgtggtcctcacacacacaaaacgatgggggagacggggcaagtgttatcatgattgtatagatgggaaatttggagttcaggacatcatgacacttgctcaaggtcacacctgtggtagagaaaggcctaagtcccagcgttcctgggtctctcctcccaagagtgttttcatggttggctgagatcatgcagggaccaggaccttgggagagacccttttctgtgatcatcagttatattaccccatattttctgcctgggagcctacaagtccagatttgaatcccagcatggccactcagtcactatttaaccttgaatgaggaattcctcctctttagcctgtgtttttcccatctgacctttaaatcccttccattgtgattcggtgcaaactgactccctcccagagagactgtaggagagacacagtgatagataggaatggcctttgcatctcttggaataaaagagtcatgcaccagagaaatcggatctttccaccagccccttgagcacatcatcctgaccacacaaagcatgaaatcagcgcttgctggcctgtcattcattgtttaggtcccaagacaagtatgaggctctccaaaagcttgagaggctatctcaggtagttagcccgtgagggttaggatgtgctccatagctgctcaccaaggtggtatggttaatgagccccacctgggtaggatggacagctccaaaaaccatccaggcatcttgcttagggacctgtctcctgctgtctccattgcactagggaaaagccgtagcccgagactccgagaagctctggcttggcctcagcatcccaggtgtatggaacctgtagtgccacgtaggagccaaagggactggccttctgaagggtcactgaaaaatcaactgacaaaagaaaggttaattggagacaaagcattcacatttatttaacgtgtatacacagagcctatagaatgcagacccaaagatacaggggaaactgaccatttttctgcttaggttcaaaaaagtatggacagccatgtagaaatgtgattggacaagaagcgtaggatctaacgtgaatggaccgagtggggaacccagcaaggcctgtctctaggttcttcttgtgctctctgtgaagctttccctccttctgggtcggggcaggatcccgtctgcaacaggagtctgaggatctacactcccacatggtggatctggtcattttttatggccagtttttatacagaaaaggagagggaaattttgaataatattttaggttgtgtggctggctttgaggaaacggggttctgggttctggtttctgtgacccatcttggggaagagggattctagtgtctatggctagcctgagaggagaaggggactgagacaggagggcaagagaaggtcagagaaaaacttttgcttctgagactgcttctaaggccgtcgtttcggggtgttgtttcctgagccccaacagcgaagcccatccttccttggagtcctgagtgtgctctgggtgggttttatgtttaggtgtcaggggcaatatgtgtttggagataaacactaagaaatctcctccccatgacatcacctccagccacaaggcccgagatcccaccgttagtacggcattcctttaagtgtagtaacgtcttcagcaggcctcatgagcaggtaccattcaggcagtttctcaagcacatggctgggtgatttacatagaattcttatttaacccttgcaaagaccttctgagctgattacagacccattttacagataaagaaactagagctcagaaaatttaggaaatttgtcctcagtgccttggctagcaagtgcctgcactggggtctgaattcccatggccttgctctgaatttctttctgtgacactgtgaatgcccctgtgagtagcacagtacattgctaatgacctgccatgagccaccttgcatattatttagtcacccacaggaaagccccagggttacaggcaagctccaggctctcacgggatgggagacaggagtagagagtggtcccagaatgcgaacatccccaagatgggctttatgttttctcaggtttgcctcggattcacctgtcaggacattcccttaccacattatttttgctccccccagaaacaggaggagcttactaccctgcctgtttccctctcccaggtccagtgcaatcaatgtcgtgaagatcttgcgagtcctgcgagtactcaggcccctgagggccatcaacagggccaaggggctaaaggtgagttgagggcttgggtagggagtctccagccagcccattggggagtgggagctccacagaggtgaggggtgggttggaaggagatgatggtcagaccaagtggctgccatgtggggtcccggacactggtcccactgcatgtcccggttccgtaatgaacagaatagtaacagaggcagccatcccaagtgtctgccctaagcagaatgtgccaaagggagatcccacacaaaccctgtgcccctgtggtgccaccatccctatattccttccactgtaagatgggaggttggcaggacttttgtccttgtagtcacggagagtccagtgggggcctttgcatcccattagggtccatcacttcccatgtgactttgggagcgtggctttgcccctctcagcccaattactccccgttgtggcaaacgggctgcccctgctacctcctggaaaggctcctggcatctcctgaagccacgtccctctccccgtcccttcccactgcagcatgtggttcagtgtgtgtttgtcgccatccggaccatcgggaacatcgtgattgtcaccaccctgctgcagttcatgtttgcctgcatcggggtccagctcttcaaggtaaagtctgggctccgttgtggtcctcctacctcccctcccatcagcattcctggggaagggaactggcagatatagtacaaacgagacagtgtcctgagccagacttggcttggatataacctccacctgcagcccgactcaaccttcagaccagggtagggaggcgctagaaggaggcatcgggccaccaggccagaggcccctcaccctctccacttcacctgcccttgaggtcactgcccttccttctagaaagagagagagagggactttcatcctgtggaacctctgtgtcagtcagttgcttaaagcctgcagcggtgacctattatcaacagcatcacgtccccactgcaccacccagctttcagagccctgcacctgtcaaagtcagctcctgctgcttcctgcagcacccctcgtgtcctccttggattctggtcttttttgccctcacccttttagttctgctattctcccacctagagcattcgcccccgctcccctccactgtgtaaacgcccatctaattcatccctctgagcccagctccacttctccctccctggcgagacctccccggagagtacagctcccatggacccgagctcctgtttttgcattgcagtgctacttgcagcactggcgtctgtattcgccaccgttctgtgcgtgtgagtcaggtcctgcccatctggattctgcactttttatcccactgtccctagcacagtgctgggctatggagatgctcactaattgcttttggattgactcattgattactgaacatctctgatactctgttctctgccttccagggaaagctgtacacctgttcagacagttccaagcagacagaggcggaatgcaagtgagtagaggtgggagggcagccagggccacggccggtcagccccaggaggctggaggcttgaccagaaaggagggacagctcattttctaagactgcagtggcacctgcgctctgcctgtgtgtcatctggcctcacggacacaatgtgtagcattttttgttcctgaagtttctgcccactgaagctcctcccatggctagaacggtgaagttcaagccaggcagtcccatcccacccagcattcaaggtcactggcaggccaggcgtgaaggaagatgggagatcccagagtaaactccttctcctcctctctcaggggcaactacatcacgtacaaagacggggaggttgaccaccccatcatccaaccccgcagctgggagaacagcaagtttgactttgacaatgttctggcagccatgatggccctcttcaccgtctccaccttcgaagggtggccagagtgagtatgcaaagcaaggccccacgagccctgacattcaagggccagtactgactttccagcccatccccaagttttgttaatgtcccgcactccctctggaggtcatatttacctgggtcctccccaggcagtgaggtgtatttctagaacttacagtccactgtcactgctgaaaccgactcttctttctctagaaggtgtcaagaaactcccaccaaaagtgacctttttttagccctctttccaacctcagcatgagccacgatgtcagagatctctgtcattacccttatggcatctgggagttgggtgtggggagagcttctccaggtgtgggccctgtggtcaccataggattcaagattgccactcccagcatgcccttcattgggtaaagatggctgagatgtctttgttttatttgactggatcccggtctccttagaaaaagccttgcctgtatttacagtggaaagtaggaaagggatggaagcccgggccccacttcctctgcagaggcaatgcgtttgtgcgtagagcagcccgtgggccttgcacgctgcatcacctctaccaggcagcttcccatcagatccttatatctttgtatagatacctgcttttcccccaatatgtattccagtgaaattagaatctgaaagtcagaaaattctaaatgtttctaagtcaacagcaatgcatggatcttaggtaagagtcacattattatgtggtaagatataggtgatagctggagaataaccaagtgctgtgcagggctacagaggaaggggaagagataatccctgtccatgaaaaataacaagcttcatggggcacacagcccaggctcaaatgaatggcatatgtatgtaaactgcttatgtctaaaaccaggccattggtgatgatcggagtagcatgggtcatgtgagtgtttttatctaagtggatatttgctctcggagagatttattttacattccttctaacattctctgagctcatgccagtttgcaaagctgtctcaatatttaccaatatttccagtgttttaaatcaatgtccatgactcatgttacatttaaatagctcttcacagtttcaaaacaccttcctatacattattctaactaccctgcaaggtaggaaagtcaggaattattgtctccaatttacagatgaagaatctgagtctcagagaggttaaacgctttgcccaaggtcacacagccagtaagaggccgagctgggactccagcccagagctgtctcctgcaccctgatccctgggatccctggagcagtggtgccgtccttccgcagaggggaccctgcttctccagttccctctgtgggacctgtctcctcctgcaggctgctgtaccgctccatcgactcccacacggaagacaagggccccatctacaactaccgtgtggagatctccatcttcttcatcatctacatcatcatcatcgccttcttcatgatgaacatcttcgtgggcttcgtcatcgtcacctttcaggagcagggggagcaggagtacaagaactgtgagctggacaagaaccaggtagcttcctaggaaggagcggagggaagcggggcccacggagggaatggcagcctgcggcccaccccgcagaggggctgcgacagggagaggccgtgcagatactgagatcgtctctctattcctcaaccagagtgggctgtcagtctttttgagggacctgtgcaaaagaaatgcaaattcctgcaaaccccagatctggcaaatgtactcagccaacaaatatctatgaagcttctacttaaggatactctatgataggttttgtcaaatctcatgccctatatagaagttaacaagttagagggacccaagtgggtcggcaccatgatacggaggagagaaactagaactgtgagggagtgagggcttttggggtggggaacagaacggcttcaggaaaccactcttacatggtttcttaagtaaaacccagaggcttgtgtgggaggtgggggcaggaaagaggcttaagtgggagtgagatggtgatgccaagtatcgtgacaggttctgttagccgtgaagagctggcagtgccgtggctgagtcaggaagctgtcgtggtgggaggtagatgtagtgcctcaggtctgttccctagctcggctcccactgggaggagtccgtggggaaacacatccctgtctgtgaataaggagtgcccacgggcaggagcgcagcgtggtgtgctccttgtgaccctcgccaggccagccagtcccctgtgggttttcaagtctacatctcaggcatagactcactctgctggctgctgtgtggaccctggattgaaagaagacaggaaagagaggaggccagttagaaagtggaaatgagagaggattagaccccgatctagtatccggttaatgatggtagcgatggaaagaataggaggaggtaaaagcgttaagactcaggcgttggacaccggggctgagggtttgagaagaagctggggacattccccagttcctgatctggaagcctgggcaaagtacagagaaatggactggctctttgccagagtcccaagaatctagttagcccagaatctccttccctctcagtgaactgtgtttttccatcttatggacactggcaaataagaaagattgatttagttggccaggcacagtggctcatgcctgtaatcccagcactttgggaggccaaggtgggcggatcacttgaggccaggagtttgagaccagcctggccaacatggtgaaaccccgtctctactaaaaatacaaaaaattagctgggcgttgtggcgtgtgcctgtaatcacagctacttgggaggctgaggcaggagaatcgcttgagcccaggagatggaggttgcagtgagccaagatcacaccactgcactccagcctgctggatttaggacaggaaagaaaaactgaggagagaagtacccaaggagggtctgtggcatgggaagtaatcagtgagaagcacagctgtcagtcggtcaggaagcacattcttagcgatgccgactccctgccgaggcacatgccaggcatcaccagggtgaggaaaggaggtgtatggtccctgcctaggaccttgttacggggatttgacaagaaggggctctctccttgattaagggggccatggaaaaatcaagacattttccaaataacacctcccacctgtaagtgagccggagcggccaatgatttctcagacttccggagaaccccaccccacagtgtgtggtctcatcacatcccacacttctctgccagctccccccacaccctccagttaactaaccccactctccccatcctccaccaccctcccagcgacagtgcgtggaatacgccctcaaggcccggcccctgcggaggtacatccccaagaaccagcaccagtacaaagtgtggtacgtggtcaactccacctacttcgagtacctgatgttcgtcctcatcctgctcaacaccatctgcctggccatgcaggtcagtcccaggaggagcacagccatggtgctgcagaagggagtgtgccatggggatggaaagtgtaacggagcggcaggcagctcagtgcatcgctttcctggtcaccaagggaggcatttggagaaagacgagtgttctctgtcaaggatgtgctcctctctgggccttacggaagaatccatggcaccctgggttgatcaatggagagaggggaggagatggagaagggagggttgagctgaatgcattcattgttggttgatcaatggagagaggggaggagatggagaacggagggatgagctggatgtgttcgttgttggttgatcaatggagagaggggaggagatggaggagggagggatgagctggatgcattccttgttggttgatcaatggagagaggggaggagatggagaagggagggatgagctggatgcgttcgtttttggttgatcaatggggagaggggaggagatggagaagggagggatgagctggatgcattccttgttggttgatcaatggagagaggggaggagatggagaagggagggatgagctggatgcgttcatttttggttgatcaatggagagaggggaggagatggagaacggagggatgagctggatgtgttcgttgttggttgatcaatggagaggggaggagatggaggagggagggatgagctggatgcattccttgttggttgatcaatggggagaggggaggagatggagaagggaggggaggagatggagaagggagggatgagctggatgcattcattgttggttgataagtggggagaggggaggagatggagaagggagggatgagctggacgcattcgttgtcggtaaggtgtggcgtgtggagggaggtgggttctgcatccacctgtcttcagggacagagcttgttcccaagctctcttgagtgccagagtctccataaagttgtcacggccaaccagggaaatgaacacagatgtgttcagagatggcagagcagggaagatcttggaggttctcctgagtcctcctgactgcccacggagaggtgggcggccctctgggggtttggttcaaggaaggtcttgctgaggcgagggccttcgagaaggctgggcaaaaggtggggaggaggagcgacctccctgccccgtgttcacagctcctcccctctcctgatgcagcactacggccagagctgcctgttcaaaatcgccatgaacatcctcaacatgctcttcactggcctcttcaccgtggagatgatcctgaagctcattgccttcaaacccaaggtaggcctctgagaaagacctttgattcccaggcatcaggggtggacagaacggggaggtggggtgcaggtattgaaggcagaatgaggggaagagggaaaaaggcatcggtgaaggaccatccctgctccgatggtcagtgccccaactcctacacctgcccagagctgaaccaggccaactccaggaaacactctcagctctcagtgttgaccctggctggcatgcacaagctgcagattcctcgctgagctgaacctctgagcctctcctaggagaggcaggtgatggtctttctcctatgtcccatcctctagtacataacctgttaatagaagaaactatgctcatagactggcagaccaaacctctccaggcccagccccccagatccactcaggcctctgttccaccctcctcccatttcatcagccacacagaccaacctcatataaaacattcagccagggctggatttgctcagggctcaggactgagggctccagcccatgggcactcctgttccctgcctaagaggctatggcattgctccttacatgctctggggcaggaagaacaattaccagcaaatttctctgctttgttccttgtgtaagggcaagaagattaggcctgctgctgaatgaggcagggtcagaattcctgttctttggatcatctgtgcccttcctagccagtcacccccattgtcctcagtggtggaggagcagacactggtatgagccacaccttccaccctgggcctctgtagatgggtcagaatcacgggtatccactggccgggattcaccaccaggacagctgcttctgagggaggctataagagcaactgagcagcccccaggctaccataacaccttttggagaaggatgagaaggaacgagttctaggagcatcatgcagttacagacttgagacaatctctccagcttactgagccttcccctccctcctttggtagttttcccagaggcaacacagatcaacaggaggccaagagcaagaatccctggccatatcttctattttcattcaagtttttactggtctcaagattaattgggggtgggggagggtccagctcggcctttgaatccatgttcattgaggagatatccacagccttctttgaatgaatattcactcacactttggattccatatcatgtgctacatgtatatcatcgcacgtcattctcaaaacgtccctttaaagtaggtattagcatccctctgtggagaagggggaagggaggctcaaacaattaagtgcccaggattaattgatccactgctaagaactggcagaacggagactggaatccggcacctctgacttcactgtattttccaccacactgaggttaactatcattttcccatgtcaagtgttctgcgggtattttttagcaagagggaaacaaccttggagggacttaaaagataagacaatattcctacaatgcagattcttctgtcactcaaagaatgcctggggatcccagctgattttcatagaggaagtctcctaagggacatcctttggtgatagaacggtggtttcctgccttctccagagaagcaagtacactctttttcaccttcctgtacaagtcccatttaggaggacagatcttgtcctgacctagagaggacccctgcgttgccctgacaccttccttagggtacacggtgtctgtgcccacacatggtcctattccaagccctgcagcccaggagctctgacagttcgccacccacagcagcatgaccagctgaggccaggagtgcagtcactgcctagccgagcctcagtctcggatgactcctctcagtggggaaactggcatcattttcatacagtgtcacgagacatatggtttaaatatttcaaagccttgagtcattccacagttgactcagatgtgtttctgacgatgtctgaggcagtctggagagcctgcagtggactttctgaatcatgcctcctgagcacgggagacatacagacaaccttccctgggaagtgcatgaaattgacacctgcaggagcctccgtcctccgtctaaaagacactccacctaaatcctgccaatcaaggaacaagccagtttcctaggaagtaaccattgcgagtggtctaaactgtaaagtgcctcctaatttcctctgtccctggttttctattgtgagaagatggggcaagataacagagacttttacccaagaaggaagacagccatcctgggcccatttgcatttcacattccagggtacatctatggtgtaaagagaaaggaaaatggatctttccctgtgaatttccctaaaggggctctggcaagagggggataaaggtcaccacccagttaggagcatcatggagcacagctgagtccctggattcttactgagctatgttcttcattcacaaatagactccaggtaaagcagctccaaaattttcaggcagaaaaccaaactggaaaaacttgaagctctggaagaatatccagctggatctggcccaagaaccagtggcttctaaccatgacctgaatccatgacaactttcatttcccaccattaagtaggactctgtgctgcactttttatttcactggcatggttgtttgtgtatgacccagatgagcatcagcatttgctgtgaaaggatggctaggaaccaaggatgttgaagacagtctgaagttgtcactgcttatgtttcgtctctgcaactggctggttggttggtccatcagccggtcaacttgtattcttgcttcattctttcattgttttcatggtcatggatgttcccaatttcttcatttctgtgtgttctcctcaccactccatggaaaataaatttactcaagtaagtccctgccttaaatctaaccatcccactccttaaattcatactctgttcaaaaaaaaaaaaaaaatcacacaaagaaactaggaatcaacataaaccagtttagattgagtcggtccctgacaaagcctcaggaacctgcaggcatggtttgaagagagtgaggtggatcatgccagcattgatttgaacagtgaacagtgacccagaaggatctccttccctagaagtgagaggccatgacctggagataactggatggcccctgcaccccacacgaaggtgcaggaccaggctgggcagcacgaaaagtgctggctggaatattctgaaggtaattaaataactggatagtcctatcatgaactgaagcttgtcagcaaagacaggaaaataaattttgaagatactcttatagatttgataaactgaaaaatatgcaatgcctggggaaaaagtctaacagaaatggctaagatctctacagagaaaatgataaaattgaaaggaattcaagaaaagctgataactgaagacatctatcatgttcctgaattggaaagctcaatattattaggatatcatttctcctcaaactgatccataggctcaataccattccagttaaaactcccaattgcactttgctggaggtgaggatggcaggagagggagccacacgtaaatcctttacggccaacaggatgaggctgggtggtcctgaggcttcagccccttcgggcagctctgaggtcaccaaggagggaatgcacaggagcctggcgcgggaagcagtgtctgtctcagctactccagtgtcggctgctggtttggtagtgggagtgatgatgtcacttagttgcctgaggtttgctgtcgaggatgtctcagcaagggtactgggggggaggagctgcaggaggcgatgagtgagaggctgcgctccaagcttctcctcctcagtggaatgtggtatgccaggaaggcaggggttcaccccgtggaaggctcctaactcctcccctccacacaggctccacctgggccgcagaggggtgaagcagctgagactcacctctgcccctcagctgaagccatcccactcagggagtagccagtgatcacctccccaagaggaggacgctggaagggccttgaccctggcagctctctggaatccaagtctcggtctccctttttggctttcccccagcctgagaatggtccagaggggagaatggacccagagtgaaagcactcattggcccctctgaccccctgctttcttgaataagcagctgaaacctcgggaggcctggcccctttcccacacgttcccagtctccgctctctttctgtctgggcctcctcagcccagctgctccagcttcacaaagccagatggtttctctcatccccctaccctttcttctggtgattttcagccagaagttgacgcatatatagtggagcccctcttgactgggttagacagtctctcgccctggccgagtgagtttctcccactgtcagttgccccagccctccctggccttccccagccagtggcagctgcaagcacccagccctttccctgcagactctttcccacccagtcctgagctggccctaagaaggcagcaagcgcaggtgaggtctggagttagtcgctgctgcgagcccccatagggcgtgtcccgtgagccatggggcacccagacactcttttccacagtcgattggacttctgtctagacttccccatcagcattttattgccctagtgacagaaatctaacagccgtgagcccctctgggttcttagctgaccccctctggggtgcagagccttgtccagctgctggccagacttgccgcctcatggcctccatgccacttccgaagtggaggcagcctcctcaccacggctcctctccagacttcctgccggcgcccttgccctgcacgctggtctctgctgggcccgacaggccttaccacagccatctggggctgtggctcctgtctgccaccacacacaaaggacgtggctggcattttcagaggatcagctaagaatggggcagcagttcagttgccacagtcttgtctgctttgaagcccctgttatctttcaggaaagaggaaatgaaggcagtgaagccttggccttgtctgcttctcagagagtagagaggcagaaagaggagcggtttctccggtcccccacctgttgtcctgaggaatccatcaacgaggccctgggcacttcctttatcgagagtgagggatgagtcaggactagtcggtagcctggtgaatgagatgctaccagaaccagagctgctcgggaccctggaggtcaaatgctggctctctcttggggccactcttcatagcacagctctgggcccagccttgccccggtctcactgacacatatgccagctaagctatagggagggccagggggctctggaatggtcgtcctagtggcgagcacctggagttcgtgtgccaaaaccagcccactctgcatcgtgaaggctctgagctgacagaggctgttgctggccttggactttccacactcaggggcagccgtcctcgtatccagtgtgcccatgtgggggcagggatcctgtggcttccagagcagtcttttctctgcaggctctgctgttcttaggactggtttctgctcttacaaatgattcttggccctgacatgggtggccacaggccctgcggaggggagaaatctttggggataccctgaggatgtggctcaaatggaagggtcatcaccagctgccttgttttcactgggcttgtgtcgaaaggcacagatgagggctgagttggggctgtaggttcgcatatggatgggcagagggaaagttggaatgaggaggtgggtgcatggggaagttcacttgcttccatagagaaacaacagcccagtttctcatctactctgtcagctctgtccatgtctagaaacttctgtcctttagatttagcatctggcctctttgggcaaatagctttcgtcacatgacccgaagatactgtggtccctcctccagccagcttggggttctccaggggcatccatgccctgtgcagatgcaaggggactttggaggctgagggtccggattgctcaggtgtggacctgctgttttaggtgttggagtctgtggcgccaggagtgagctgctcccaggaaagggaccagattctgacattcccctggcaggtggagaagttgggagggcaccctcagcagacaactcagcccccaagtcaaaggtcagatctgcttgtctgagcaagggaagagaaaccacctttacgaactgtgggccaggcctctttcccacccaggccagggtgtcagtctggatggtaatcagacatgttctctgcccccgggaggaggcaagtggacggcacaccaaagaacaggctcctgaaggttgccaatggtgacagaaacagccacaggagaagagagtgcatgagcctgtgtcagagcagcggctcatcagcctaaggagaggtgtggcaaaggccacgaggccccaaactgccccaccggtgccctggggcagccagggctgaggcagtgggaagaatgccagggccagaattcctctaaagacaccaatgtggccacctgaggggccaggggaaccctgcaagctaaatccatcaggcctgagctgagcctgccccggaggcaggagagactccgatgtccacagactcttccatggactgttgagagacatttcagaacgtgttcttaaaagctcagtcaaggaccaggagaaggaaggggaagtgggatggccaggaggaaaggatgcacactggagcccgttcctctttttgaaagcggagaatcttctaggaacttggtttgtttttcagtcatgttttcggcagcaatgacattgctggctgaaatgtactttctctccaacttgacctctgcctccacctgcaccgctcaccaggaatcatcctcttccaactgttttaaattagccatgcacttctgtatgatgcagtaatttttgtgaagttttaatttttacaaagcaaattttgctttatgtcttcgcttcatcatccactgaccccagatcccacccagagaggaaattctggtagattgagacccaggaagcctagatcccacctcagcatcaccttgaaccagccagggctgagcagacgggacaggaagagcttcctacaagcacttgttccttccatgtctgtttctctgtaaagtaggaagactgccttagcatactgtggtgagactgagtgaggtcatatctacagaggaatgaaggcttcagggaaagtgccattcagatgaaactcagccggatccctacgcctggggagtttgcgcccagccctctaactcagcaccaaaggaacttcacctccagcctgggtgtgccctcttgtctgtgaccattttaaatgggcccttttgcaatattggtattctgtcgtctttcatcctgagcccatgtattctatcccttcagtctgatttctgtctcacaccatgaaataactttaaggctcatcttaatgcatccttgaagttgggttgtgcaagcatcaacgacgctaccagcatctaaactatcactcccctttcctgtggctaatgcaacccattagtcggcttttcaagccttcagctcagtttttcaccattccctctctttctcggtgcctaggccttgccattcttcgtattctttatttcaagaactctttgtttgtgtgacttgcttagtgttttgctgcaggctaaagttcaccaacaacccccaaaatattttgttgagcagctcacgtgctaggcggtaggcttggtaccagggactcaatcatgaatacaagcaggtaggtaaggccacacttgcctggggcgactttggcccactcttgagacttgtagcatccccagttcaccctctcatttgtcactaggaaaactcctgtcagctggcattcatatttcaacttaaaagaagcagtcgataatcaatgcctacacctgagatcaagtaacatttagaagcactggagggaagcaaacaacatatattgtcaatgaagaaccagacatgaagctggatattttacttgccttatctcattcaatccataagacgaatattatggcctcccattttacatctgaagaaactggaggtcagaaaaaggctaagtccagagctggctttttgttgttattgtcagtttgtaacaaacaccatcctgcttagtatgcaccctaatactgctctaagcaccttaataggaatgcatttaatcattgtaaaaatcctgggattctattgcaggcttaggtgactcaaaagccactctttccacgacaaccctattaaaacaagaaatgtgaataagccatgttgttgctatgcgcttagtgagtcctcagtaaatgttagctgtcttccttctaagatccgagacagaaagaaagaaagccattctcgagtcaccaccctctggaatggaaagtgttcactccactcctgtgtcctgccaccttctctgaggccccttgccgtccttccctctcattcagccattctgtctgtggcccctgcattccctagattgctttggacctttgaattttgtttccaaatctgagttgacaagcactttcaggagaggggtagtcagctgacaggtgggctcaggaaagtgaaaccgaagcctactacacactcatctgcatgtgtttccacacacacatgcacacacatttgcaatgggaagacttacacattggggacacaaaaattgccaaattcatcaatggcgggagctgtttcatgttcatctctgtgccatgagaggcattcagtgaaagtttgatgcatgcatgcatgaatggatgaatgagaattgtgagcccggaaaagaaagtcggaatattagtgtcagaaaggattgagaccattgagcttccatcagtgcagaaatctctacacagtcctactttctgccatacaagtctccttgtttctagaggtagctctgttggaaatccttctttatactgaattaaaatgcacccctctgtaacttccacttatccgtacttccttttccatcttttctttctataagtagttcttgagcgcctcagtgatgatgttgaagcatggtaccatctttatagggctcacagagtagtgcgggagacaccaatacacaacaaacaaaggtttcagatggggtaagggctggggtggggaaactaaagagtgtgagtgaagaggcacctgtttaaaataaggaggtcaggaaggcaccatttctgctgagccctggagggtgaaaaggagccagaagaggagcatttcaggcagaaggaagagcaaagaccccgaggcaggggcaagctcagctcgctctggaaactgagagtggcgcgtgaaaaggactgtgccagagcgcacaggcccttcaggatcacggtgaggggtgtgcacttcctctgactgtccttggaaaccgcagggatgggccattcagtggggaggattatataatctgattttcattttttaaccagcatgctggctgctcattgacaaatgactggtgtggtgagatggggagcagcaaggagcctgatgctgggaaggcaggtggcagtggaagagatggagcgaggggggcagagtcatgacatcactggatggcgaattggatgtgagggtgaggaacaggaatcagagacggctccggggttcctggctttccctgagtggatggaagagtggtgtcatttgctgaaatagagaagaacaggaagaaaccagtttaaagtgagaatgtggggatatattaggttagaaaatgtcacgtaggctgtgaaaatctggaattcagacaggcgatctgggctggagatgtattttaggagtcagcgccatctattccctctgaagatagaaactccaagaatcctgtccagaagccttcaagtcctgggagaagagttggagaacatgcagaatcacaaggaaactgggagagaagagaggaaggagaaggaaaggggtctggaggccaagagccaggaaggctgaaatgaggggtggagaagaaaatatcattccccaggataagagtagggatgagttaagccagctgcggagaagaaagaaacggtcctccaggccttctagaaactgaggacaggcagagggaggccagaatgctgccctgctgtccagagggtgacatgaaaagggccggacagaggccagtgtgtgcaggcccttcaggaccacagtgaggagtgtggacttcctctgactgtccttggaaaccacagggatgggtcattcagtgggggaactgcataatctgatctggggtcttcagtgtgcacctttaccctcacccacgtcctcccatactgagcatcacagaggtccctgactctgcccctccttctcccatactagaaatccttgccctggaggagctcaaaagccaggccttcccagaccttgctggacatgtttgcgacagaaccagggccctttccttttcccagctgtgcagaattgaatttgcagtcctcatgattccataaaaggagtttccaagacagaccttctgcacttctctttggctaagaggttctttgctataaaaaacacaggataatgggggagtgtaccccgcccccagcccaatgctgaagctagggacaggcgttctcatacagctctcttctttccttcacaatctttcctctctcctcgctctgcccaccacccaccacctcacctgtgttccgcccctacaatggtcagggcagcctgaggctcataagtctggccggctcagttttccatctcctggtggccttctgtggggcctcaggacagatcttcagggccagtggctgttctcagcctcgtggggataaccctgaccacagcaagaaatgccctgctcttggagtcacttttgaggaagacgttttcatctctatgtagtctttcgatgtacagggaaatgccttaaaatcttttgcaggagcccaggccttcgtcgttcactgctctgtgttcagccctgctctttgggaaggtattcaagaacagtctaagatgttgcctgaagaaaaaaaagtggcagtctagtgggacaagggtttaggatttgggatgaaaggaaagtggctgtgattgggtcacgttcaaacatcgagactgttggttcctgcctggcattctccctcccatccctcccctgccgtagcctctctgggtccctgcagaagcttcgctgttcctcgtggttctgcttggtcctgagtgcccccacgagcctctccatggttccccattgtccacagaggaagctgctctggccggccccgtcctccagcccttgtctccttttcagagccacccatgctctcaccttttccgtgtaataaataataaacacctctagtgctgcatccttcaagctgcctcccgagatcagcctggctagaagtggtctccaccacctctgagcttccagagcacccttttccctcttttctggtacttaatcagagctcttgatggaaatgtctcatccttccagcaggactggaaagtctttgagcaggactgtctcttggtggcatccacactgacctccttccaaatgctagcccaggaatgccgtgtgcctgtcatctctgtcagtgtcagctgaatgaaggccaacggaagacaagacaggcagcttcctctggggtgcccctcctcgcaaaagtgactccagcccctggctcacaagctccggcatccagcaaggacacccccttcagttctccacccaccacaggagcttgtcactctctggggtggtctgccggaagagaaagcagagatggaaggcaaagacagtggctccggagccgccatccgtgccgtgctcagcaggacttagcagcatggccacccaggtcagggaaattctggctcaagtgtgctcagacagttcagtgcagaactcagggccagtgagaggtgctgggccctgagactacctcaggccaaagttctgaaattcaaccctcccaggctcattggaggatggggtccttgtttgggggtttgttttgtgtcattggttttttgtaacgccgatgaacacttccacagacctagtgttctacagaacacagttctggaaatctgtagggcgtcaccatgattcggggaggtaaaactgacatttagtgtttagcgggtgggactgaggatgctgaaagtcccacaacgtgtgagagggttctgcccagtgaaggagcatccttgggccctgtggaatgtttgggaaatacttatccaaggagcacccttcatgggtgatgttcagtgacactgatagtgggggagtcttcagtggctggccaggggccgaggctcagcaaggataacactgccactagaaatatgaccgtatcttggattgtatgactgcatttcctcactaacctggaatattcacattgaagaacttgaagagcaagcaagaattttatttcaaaaatcgtacggaaacctagacattctcttgggctaggtcttcaatcctttctggacccagtgctcttctttttggaatagtctccgcacccactgtatactccatgtccctacagagctccacagcgccccgtggtggccagtgtcaccccctctctaagaacccacacatagcctcaggctggctgactcagcgtcttagtgacttttagatgaaacctgtttatccaatctattgagaaactgcagtgtctgccaccgtccacagaaatccctaggtagagaaatgcattaaaaggagtagaaaagggaccgggaaagaagggcagcagctgcggatgaaatgcggcaactcttgccccagccttcgccatcggcacagaattcagaggccaaagctgtgtgggccaagctcccgcattcccctgattattatttatttgcagagtgcccacggggcaccgggtgccacgcagtgctccttagacaggcaggccccagctttgccaggaggaccttcccccgctccccccgccccccatggctctgcactcagggatttgcattttgttacaacactgtgacaggtttctttccggccttgtgctggagagcttaaaagtcactatgaagcataaaaaataattatatgacttgcataaagccttcatgtgggaaggctagtattagctattacatttaattatttaatgtagaaaattattcacacggtgtaaaaaagcccggtgggaaagtacactgtggtttccgtctctggccctgccacagggaaggaaactggaacacaccggtctggtaggaagaagagggattcccagacctacagggtgcgtcggcgataacccgacccaccaaagcccgaggtgctgccagtgcttccggccctgcgctgggtcagcctgccttaggggcaggaaggaccttctgtgacacaggctgcgggcagtacaggaaggtagcctctcagcaagaaccccaccaacaacagcaatagtagcaactgtagcaatcagtgagcacgttctcggtgccagacagggcaggtgtgaacttatatcattctcacaaagccctataaggggccaggcacagtggctcacacctgtaatcccagcactttaggaggccgaggccaaagggccgtttgagcccaggagttcaagaccaccctgggcaagaccccatctctaaaaaaaaaaaaaaaaaattctatttttaaattagacagatatagtggcacacacctgtagtcccagctccttgggaggctgagacgagaggatctcttgtgcccaggagatggaggctgcaatgaaatattattgcaacactgcactccagcctggatgacagagttaaaccctgtctctaaaaataaaataaaataaaaaccctacaagggcaagtactctggttattcccatgttgcaggtagggaagctgaggcacagagaagttaggtaacctgcctgcacaacccgaggctcattgtgggaagtgaaggcggtctatcattttattcacatcttgttcaagagtgtgggtgcaggttgccggccagatgccctggccatgcctggagctgggcatggctccctcccccacagccacctctgcccagcgccctgcctggcgtacctgtgctctctccaggagcactcgcccactaggttagagagggcacaaggcaggagtgacaggatgggctgtgggagctttctgagagtgctgagcaggaagggacctctctgtttggggtttggaaagctctctccatggccttggtcctgtggattggactggaaggggttctaggcaggcaggcggttttgaaggctgccacagattcaagccctcccatagcaaaggagagattgctcctccttgttccagccacatctgatgctgcttgtttcctgccttcccttcttcagagtgcatggtgctgttcatttgagcttaaagttgcctgtgtgcatggccatgtgtctgcctagccttatccctctccaaggaggcattgattcagcaccctagtcctggaggcacctttgcagaaaacggctcatttattccagcatgagtagtgtgaagcagctattgggatcccccaatctacccaggtacaaactgaggcagaaaaagagcctcctgagacccccaaatggagcttaacccataaccccaaattttcatctgctctcagtggggaagatggcaggcttcaggagggctgattcatattcgtatgcccaagccttgcatagttacaggcctctagtaagtgcttattatgtgttgatgagataaataaatgaatgagtaaataaatggacgaaggccttcaaaaatgtcctggggaggataagccttaattccaaagaaaaatgggagcagaaagtgtccagttaaaagtgtgcattctaaggagtgtgtgttcctcctgcaactaggagagcagcccccctcgcctccacccgcctggggtcctctcacgaggcaagcacccagccccctgcccactcctgccctttgtccaagcagtcctcaagctagctgtgcagcgtgtgtcttggggtgcttctgaattaacacatcacaggatgggagctgacagaggagggcagaaatccccacctcctcccaggctgctggcagctgtgtgctccagttatgccttctccattaggtgccactaatttccatgattactgttatgtctaaatggcatcctggtgtaatacaatttatattatctctgcttggtgtcggttaccattgttttcatgatattcaatgggatcaactctgcatagacacacagacacgcactgagacttcaccaccaccgccgccagctgccagtgggacccagctcctctccccggttcattcggctctcatcatttctgggacccagaaaagatcagtgtttccaggagctgggcacagctccctcccccacagccacctctgcccagcgccctgcctggcgcacctgtgctctctccagtgcttgctcactcaagcaggacctctgctctcttgcagggacccccttccctaggtccggtgaagccatctgttgcccctccctccctcagcgccaccccaccgtggcagcctccagctgcttcctgactgatgttcctacccctgtctccaagggcccttcagaggacccgttgtccttttccactctctgtctcaatctcagcagccccacttctaatccagccccgaagtcctgcagcccctccagccagcacgctccgtgacccatgtgtcctaggaggggaaaccacgtgttcagagtcagcttccccacagggccggggaactcaggagctggctgcctcccctgtgtttcttggggcagataaggaaggcaggcaggaaggaacagagaagagaaagaaatgagtcatggcagtgacagcacctctgccctccaaatgcctaagactgacagcaccaccccaggcaaggagtgaaaggtgtgcggacttcgtcgtggacgccttcttgccaccagcctgactgaaagctggtgcggcctctgctctgggcagagaaggagcgaaggactcggaattgaagggcaaaggcatgcacccgtcaccccttccacagcagtcccctcgcagctctcctgtaacagacagaaaatgggcccctgccaccacccctctcgataaaagaagagtggcttctaagaacctagcagttaactgtctacatgaactcgagtcttacaaaatgcagccgtgacaacctgcaccctgtcgccaatcccaaacagcgtcagccagatttcattcaggagagtttgaatactagtgacctggaggatgggcagaaaagacctgagagacagactaaaggagaactcaagattccagaaccttcagcttcctccttcctcctttcacacacctaggctttgtttccctgctgttcagtcccacacccaaaatagaacctgtgactcctacgtcactaggcagagcaacgctggtaaataatgacagtggctgaccgggcgcagtggctcacacctgtaatcctaacactttgcagggcggagacaggaggatcacttgagaccaggagttccagaccagcctgggcaacatagcaagacctcatctctacaaaaaaaaattaaacaattagaggggcgtagtacttgggaggctgaggagcttgagaccacagtgagctatgatcacaccactgcactccagctggggcaacagagagagaccctgtctttaaagtgaacattttttttaaaggtagaaattcagagattttggtcatcatcctctgtctggaacattcacacatccagaacacctattcctgaggaggccggatagagtcggtataaagaataggcatctcttggatttttttaaaatacttccctaggtattggtcctcacattaaccctatgcaagacataggactggtgcttgtatggataataatcagattatgattacctcccctcagaaagctcaatctccagccgactagaataaagacaacggtgatgacgagattcttgaaattgcacttgaaggtgtaatgaggtggaagcctctggactctggttgctttttgttttaagcgattgcacacagagggcttgggaagtgttcctccagttggcaggaggcccatgatttcttacataggtagtcatcccatcccttttcccactgggagatgggcatgtcttgtctccaaaaagcagaggacccgggaggtaggcattttacagccaggaagtaccactggaccatggccccacagttaagacacagtatctgggaccagaagaaagcaataaaagatcaggacacatgtgccttgtggatgggagcagaagaaatggcaagttctgagtgctttggatgcatggtctcctttcaccctcacctcaactctgtgctttatcccatgttctaggtgtggaaacagtggtatagggaagttaagttatttgttcaaggctacccagctagtcagtggcagaggtagtgtctgaatccagatctgcctccagagatcaagcttttcaccagtatgctgcctctttcaacttggtatatctccaacgatggagccaaatcagggcatggacaaccaaaatggaagaaaatccacaattctcgtgcatgtgaaatgcatcctatgatgcttttgcagcagttgttccttcccagcaatgattttctgatgtcaataacaatttggtgaccattttctcagcccacccctatcagtgagtggaggtgctctggcactcaggcctaggtactgggacctgccctgagatggccagaggagaggcccatcttatgaacacatctccagagtggggagttggaagggggaaatccactcagcctgtgggattgggggatggcgagggcaaggcttccagctgcaaaaacgctttcccttctgggcagcccgccctgcgtggctctgaggagctggacagtagaggtttggtttgccacttcaaggagagccaggaaaaccctttctccaaccccttacttctcaaccatttgggacacagtcaccagagaaataaggggcaacaggtataaccagactccaggtcagactgatttcgtaagacgtgtatgatttttttcccaccctcccttctccattacacccttaaaacccctattactaatggtttccagcaaccgagggggcgggcaaaaacagagagaagagagatgagacagcatcaagcccttccactcccgagagtgttgggaaaagtattcctcctaggacccaaccacctggggacttggggaccagcaggaaggacctgggccttgtttctgggcagggtgtggtccaagtgggaggaaggggctgttgaaatagtgggaggaggggacaaaggggcaatggggatggaggcctgaaagctggccctgaaattgtcttcatggtccagctggaggactgaggggctctgggcaccaaaggcaggacggtgggaggatgggtcagggtgaagagctgcctcttaaagggaccctgtttgtgcccagacatgtaccctcacccactgcattccagctctgtggaaatcccccagggctggggcacaggagctctcagcgacaaggaacctggttggtttctgcagctcccaggtagtgtgccaccaaacagatgtcagtctaaagcctggagtagcacagcctgctgaggacaagtgtgaggcacaaggccttaactccaacagagcccagccagtgccaatccagtgagagccagcgtggagccatgggaggagggggctcccatggtcaagaaagagggggctgtgccttctgtctgcacatatacaaagaaatctgggagaaagggtgaccaggggtgcacagccaggcggttaacagggttcctttaggtctcagcccttcaccctggtgtgcccgctgattaactgtgtgtgtttctctggttttcaacaccaaacctttgctctgttctgtccatttcttccttttcctttctccatcttagaggtgttgcagaccaaggccaacttacccattttgtttcaggtctctctggtggatgaagattccaactcatcctcctttcttgagcactgacactcacaccttcctctctctcctcctcctcccacaccgaaataatgttttcttgcacgctttctaggctgatgcagagaattcctggattctgctcttgttcttgtttgtctcccttctcttccttgacttccctgcccttcccttctgaaatagctctaccccacaaagacagtattcatatcgagagggtcacccagtgttttccaaaatctaattttaagtcttatgcatagctgtagttcatctggggtcttcacttcttatttccctctccccaaaatcactattctccttttgccctgtgaatgatatctgagaacctgagagcgaattggttatttcctgctcatagcatgtgacttaaatgggagaaagaagtctctctgcctcataggctccactatattcagaaaaataccctgggaagccaacaagaaagccctgatttgaagctgaccctcacctcacccacgccctggtcagctaatctctgcttcacccatcctggctgtccagtctccggggtggcgtttctgttttctttcggcagaaatgcctgggaaccgaaaggcccctttccctgtgacctgacctcccacgctaagaataacagccccaggacagcatgtctttcggtccctctggaaagagggcatggctgggaagtgggaagttaagggagctggatagagctgggaggaaagggaagaacacagattcttggctttgtgagtaaaaaatgaagaggaaaagttggcagccttcaagtgagctggggagagatctggggaacctctcggaggacgcttcatgctttcataccccactccgacctcagaattccacctcctggaagcccagagggcaggcaaatactggtcccactgaaaaaatgtggccagccctgtcttgtccccttcgcagaccatttctaaactaaaggcgtgaatgttttttcttaaagaagacaaatctctgtagtactcggtccttccccctccacccatggggaatatgaccgcctgtagctgggggtgtatggggactatgaccgcctgtagctgggggtgtatggggaatatgatcgcctgtagctgggggtgtatgcacccattcagtcacagaacatcgctgtgcaggcccctacacctcctacacccaagaaatccatctgctaaagagtccactcatccaggacacctggggtcctatagggcctctgggacagcccattccttggttgacctgttgtccaagtacatgaaaaaagtcttttaagaacattcgtcccttctcttctccaaacatggtgaaaaataaacaaaatccatagctacagaatcaagtggtaaagtcaggatactggtcttccccttctgtgccagaatctctccttcagggcaccactgtcttcatccccttctaggcagccagcctcccccaacctaccagcctatccctagcaaacccatcctcaggaaacgctttgatcaccgcgtgccctctgcgcggcgtctgcattcagcaggaccctacctccaaatgaccatgaaagaacctggggaggggcttagaaagcctcagaaagccctgtcaagagccacataacacactcccggagtaggagcccagccttgcctctgtctcctttcccttaggaaagtctttgccagggttggaactgcccctggaaacactggggcacccagtgcaggaactagggtaccctgatttgatctgcaagagttgcacttattatggatcttgttttaacaatttggtccttcttttatttttgagctttatatgagtcaccagtgagcccagataacctgccaccctgcggcccacattgatggctgtggttttcaaagcctttttcattcccagcttcacccataggaccgagcccgctaccctctgaggggtcacacacctgtgttccctccctccagacaggcccttctgctggaagaggactgggggtgcaggagatgctcagcgtggactgagaagagagcatagtagccacatcctgccgcctggcgatttgcaccacccacgccccccacacccactcctgcccctggtgggacgtggacagggcctctgtggagaaggggtagggtgggtggatctgtaggatgggggccacgtgaccgagggaatgcgggcagtagggttagagtgtcgcctccctgctgctccttccttgctggtgctcctgggctcctggccatggtgagggcgtccggaactccagaggcaacacggaggtgcctggacgatgattctgatggtggtgttgctctgttcttgtctgtctaatattcctttttaatccccatcctgcctgccctcccttatgtagggttactttagtgatccctggaatgtttttgacttcctcatcgtaattggcagcataattgacgtcattctcagtgagactaatgtgagtattactctgccctccccaggaaacctcctcattcctcctcctctgcctcgtctatttctctctctctcactctctctgtttaccttcttttatgttttttttaatttcctgtttttacccgcctccagtcatgccttttattgaacctgccgtcgtcctgtgggggaaaaaaagtgggagcttctcctcctttttttccatttacctcagctctgcccggcgctgccgggctggggcgtggagctgagcagagggagtggcggtgcaggggacacaccgcccggctccccggggcggccacagccccacgccacctttgaactaacccagcttttgtcaggcctctgcaccctgcgaaaaccaggttatccaggtttgagctgccagaactgtagagtggtaagagagtgtttaatatgcccacgtaacctctttcttttctcattttttttctcttctctccctttttccatacctttttttttttttttttcatttttcctcttcccttttgttttgttttgtcctttcttgttggttcttcttctctctctccccggctgctctgccccatgcagcactatttctgtgatgcatggaatacatttgacgccttgattgttgtgggtagcattgttgatatagcaatcaccgaggtaaacgtaagtacatggcgtctgtccctaaccgtccgtgcctgctctaacactcatttgccttttcccggtttgtttccttcattttattttctctccccaccttcttattttttttttttaatttgtttgtttgaattggtttgaaggtttttttttccttgttgctttattttgaaatctttttttttttttaactttggaacgcattaggccttccccttttctgttaagttctgattgctgcatcttttctctctcccatacaatcagcctggcatgactcacactgtatcggaggaagcagctctgggagctgtggagtgagaacatgaggggatgtttgccactctgggcagctgctggggcagggacccaaacctcttctgacctccaccttctcctccagccactgccttccctactctctcctttgcatccccacagcatctcagaagggagctctctcaaagtggaacaccctgagataaggctaagactcagcctacaccgtcagccatagcccaccctcgcccaaggaccacccatgatctcgggttgaatgggctctgttttcatttaacatcagcagcccatgcaggcatccaggtccctgcaggctcatttggaagaggaacgagaaggggaggatcagtcatgtctgaactcttctctagaggtggtgggtgacgtactgagagctgctctgggtggacctttcctcctagttgctgtggaagcaggccccatgtgagcgcctcactcccacatgcacctgccacccctgccctcgacccctgacctctcacacccctgcctctggctcccgagcctcagacagcaccccagcctctgcaaggcctcctgccacctccttctcccaagaggtgcctcctcctatacagttcctaccagttcctgcacatgtcttttctgttacctggcatgtttaaatctctctttatctataggcaagccttcttgcggtctttaacatgtgttgtttaattttttcgttattatttttccttaattaagagacttggtaatgtttgcatagacttttgatgcactgaactattgaataacagcacagagcagatgctttagagttttgatctaagatgtttggaactacccagcccaccacccccagctcctccatgcacccttactcccctctccactccatcttttgctctcagtcagttacactgccgtgttatcttgcctgccagattcttccagattagagacccctgtctgctcctcttttagcagatggactatggaaagcggttgtcacacttgtcatatgtcccccgctgtagtctggtgccccaaccctgctcaccctatagctccagagaccatggcccctctgtctccctgtgtctctgagaactgtctttgtccggtgtgtgtgtatgtgtatgtgtgtatatgtgagtgcatgtctgtgtgtgtgtgagcatgtgtgcatgtgtgtatgtgtgtgagtgtatgtgtgtatgtgcactctctcttaacttctcccagtaaatcctcagatcatttttttaaaattagtcttcctactcgtgctctgagactcctctcccctttctgaatggaccccagttttgcagctggatgagccccaagttgctgttcccactcatacacataaaggccagagcttctgtgcccagagcttgtgccatgcagtgctcagccgtgggagacactgcagggagagaaacaggaaagacagggcagcagtgggctctgccctcaggaggtttcctttccagacagcagtgcagagccacattaaaatctatgcagaggggccgagagccccacagcaggaaaacgcagaaaggtgaccgcaagctgcccccctgtacagtggcccactgcagctctgggggtcctatgggttcttcctacagtcaccaaggccccatcgctcagtctgcaattttctcccaaactattcatgtctttaaagaaaaagaaaaaacaacaaaaaagcattttctaggatataaaatttatacagaaaagggggctctgttggggatagggagggggcctgaacccgtccagcagctcctgacattggaatagtggttttctatttacaagtcactttgcatttatctgacaactctaaactaccctttaaatttgacaggtaagaattctcatccccaatttgctgatgctaaaggtgatgatggagagattaagtacctttccagtgcctcagagtcagcctagccctcctggggccagctcacttcctgctaggccagaattcctggtttctgtactccacagtgccttttggtaaagagaaacctcacctgtccctcctggtgtactgccactagccacgacttactcagaacttacattctgtaattgatatcttaaataagcacagggttttttccactttctaaataagcaataatcagccaccctgagagttccgctgcccctgtgtcctcccatactgagatgctccgggctgaggcatttgtggctttgaagtcccactgaaggattgtcgggggacagggtggcaactgtgcatgtgactgacagcaagaggaggtgtcctgagacccaacacctatttcagagccactttctccctctcccacacaactgatggcttccgaaccaaaagaacaaacataacatcccccaaggcaggaaggcggtttgggagaggagaaagctggacttgaagtcagaaaactggcagattgttgagtcttgctgctgcttcctgtcaaagcgttaccaacatgcccagagactctgttttttcatctgtcagaggaatgtggtatttacagcagtgtgttttgaagctcaaataagagcatctatttaaaaactctatataaactggtaaagcactgtggaatgggaggaactgtggcacccaggcaaatgacattccttccaaagttactgctggtgtcactcggagggcctagtctccaaccaagaccttttggttagtctaattataacttacaacccacagtcgaaagccctgtttcccagatatgcttagacccatagagatggccaacaggtacaaccagatcaaagccagcacacacacacttaccacggcccataactctgggccttgaggggcctgctctgaaagcacagtccggcttgaccctgggctcacatcgcagccagtgtgagggacagcagcttaattgagcaaggtcgctccctcccactagattctgcctccagggcattagcagcgtatgggcggccccagcattttcttccaatcccatgggatccttcagaaaatcctgcatccctgggccctgctccgggccttcccaggtatttttagtcatcctctcatcacaagacatatattcccagggatatggtctatttggaaagagtctacattgttagcctcagtgtgatccatgagggcgtttcacctgtaacctgccatctttaactcctaaacccctccccagatgccttatccaccctaactttcctccaaatattccccacatttaaactcgtctcaccttttctcttttccgggctatggggccctccctctcaggaaccatcattcattcaatccacagcatttagagtctcacttcctatacgtcaggcaccgtttgaggcacctgggatccatcagctggcaaaccaaaagcccctgccttcacagatttgcattgtagaagggaataatcagacaattcacaatgcaatgaggacagaaaataaggaactcatacggtgtgttagaagatgatagacgttttaggaaaaaaagtagtgccagataagggggctccaaggtgctggggagcagtgatggcaggcattggtttaaataagatgggcttccttaaggaggtgacagttgaacaaagcaaaggcatgaaggaattgaggattctccatgtggagatcgggagaagaggtagcagggcaggaggagccaacctggctggtgcggactgagctgggaaaggagaggtgagggtagcagaggggtaactaacaggttccacttttgggcttttactctgagcaagaaggggacatactggtggctttgagcagaggtgtcacgtgacccgactggtttttaaagagaccactctggctggctgtaggagtcaagggtggaatctggaagatcatttagaaggcaaatgcagtcatccaggtggaagatgcatagcgtggagcaaagttgtggcagtagaagcggtggaaaatggccagcccgtcactctgttttgcaagcaaaattaacagtgtttcctgacagactgcatgggggcaggaggagaattgcccaggaggactgggaggtttggcctaaatcagaggaggatggagcaggtaggcaaggaggcgggctggaggcggggcctgtgtgagttaggaaatgccagagcacagttttgacgtatctgttagcccttggaggggagatgtcaggtggacacacaggtcagaggcctggggatggagtcattcacaacaagatggtacccaaagccccggcactagagaagaagaagcgacaagaggcagaggagcggagaggcctgggccagggcctctggcgcgaggagatcgggacccgcaaacttctgttcatctgggagatgccgctgaacaactgccaggtgtcacaagaggaccgtcttcaggccccctcgtgcggtcatgctgaattcagcctcagtatctgagccatgggccccggcccttctcctgccaatgcatcacctgggtctaaatccgagcttttcttcctctgtgagccggggaggtaagagtgcgatgtcctgctgctctagggaagcctcttgctcttcctcagtgcttgggtctgaaatcatattttcctgtgattgttcgtgaaagttactacagcaccagaaactgctccctaaacatcccaaactggaattaatttgactgcttgggccaacagcctttcccgacacacttctttttcattttgtattttaaaatatactgaacaatagaaagtgctgggcagcctgaattcctgcattatggacatagagaaacattcccaagttgtcaatgaagaagccttgattatgcttccagctctggtgacttagagcaatgaactccattctctgggcctcaatttccttgaatgcaaaagtgaggagtgagaggtttaggatggtctcttgcaactctagcctgcagtgattctgacttgggcattttctgacagctggaggtggatgcttcattgcccccattgccttgctgggttctgaggtggtgtttcctgtcatcaggcgcccatggtgtcatggggatgcttcctccagggaatcatctgcatagagataatccctgaagccacagtgctgaagggcagcaagggaggacaggctcccttggctttggtggagctcacctggagattctccagagaaaaggagcaggagaaagaccttcggggagcagagcaggcacagggaggggaaagaacactggccctggagcttctgggcacagctctcaggaggaattgctggaggctttgcacgatgcacaggagtgtccagagcagggaaataaagctaagcgaaggtggcactggctgtgaacatgagaagaggaccgacatgaggatgacctgatgagcacggatcaggcatcatgctgaggacaccatacacatgatcggatgaaacccgtgtgcttactctccacatgaggaaatcaaggctcagacaggacgaacatctgcccaaggccacacggtgaatgggaggcaaatcttggattcaaactcatttctgtccaagaattggctcttgcatttcacagtgcccgctggctaaatccctgggccaggctggcctgggcatcactgaagggcagggcccagtggctcctgcactcctcattcagtgcctcctggcaacgggacttggggcggagctgcctgacttgacttctctgtgtcggttgatgctgcggatgctggatccacaaagcctgggatccccctgggatgctcagacagaatgcaggctacacacccggatccgtgtctctggttacagggaacagaaggcaaacgccaggaggcgcagagcagcaccactccctttgcccagttggcatctgcatctgcagctgaagaaagagactgggaggaggggggccagaaggagcaagcagcgacaaggcagggcagagagtgtccagggatcagcatgtcgggatactggtcccaagtcttccccaccttcaggccctgaaagcctttctaccttagtatctttccaccataggcccccaggcacaacttcctataactgtcactcactactctccacaacaatcacaagcaagccgggctcctctctggctctgggtcctggaaggatggaggaaaagcagtcagtcctgagtcatagagagagctacttgctgcacgtccaccccctcaggggtgagtcagctcagcctgcacgactccagccctctctctcggcctgcaacccacagtgcttgcgttggacagtgggcctggctgtctctgtctgcctttgtggctgtaaccacgcctcctgccccctgccatggcagagaaggggccagaatgggcacaagaaaggcaaggctgagtgccccccactgcccatagctgtgatgaggaaggagggtagagagatgtggtcagaaagcagatttgtccaaggacattagggtgtacacaccttagagaccacctagcccaaacccttatttgtttattcctcaaaggtaccttgagcacccgctgtgtgatgttgcttgaggatatacaaattttctagatgaggacacaaaaggccagaggcaggaaacagcttgctcattttcacaggtttttcacagcaagctgaccggaactcccggtcagtagggggctccagtgggtgctgttgccaaccattgtctagatgacattggtgggtgtggcctgagctggttctaggacacatagattaaatcaagttccgtggtctcaggacagctgggtggggcagaggttatccttgacatctccctccagccccccttctcattgctggagcctcctgttgccctcggagtcccttccagcttcttcccactttcggcaacagcccccacccccaacaaacctaatgctaccaagatgccttgtttcaaaatgaagtgattccagcacagtcattcatgctgggtggtagcaactcagtgagctgcccttctaatagatcattgtaccttgaagagaaggcgatgctcaacctgcaggtggaatgtttattgtatctcaggtgagcctttagcaacgtgacccctgagtggggagattacttttgtgaggtccctccccatccccccacaaaggctgttttctactctgcttaagagtatggctggcccttgagagagttagcagagccaccctcattcctagaagtgggatgaagcatctgaccatcagcagtcccctgggaggaggccgaatgccccggatctcaaggtctagggcgaggcttgttgtgtgaactggtgtgatgtggggttgagggggtgcagacagagagacgggcctgagaagtggcctggtgcagcaagtcttctcaaaagcttttgccttgagaagtaccctgcaggtttgacccgaaaggtcatgggaacctgtttttttataggcatccaatttgggttgttaattcagctgtgtgagattgccgaggtcctgatgcggctctgacccatccaggctccccttgccctctgccttctgccccaaactgtgtcactttttgtttccctcaaatgctctttcctttcctgttctcatcttatcaacccacatacggccctctgttcccttcccctccgtgtaagggtgggaggaagttgcctagcacaccttttgttgtggccagacaactgattgtacctggccagtgtctgacacttcagttcctacaggctcagcaacctgctgctggggttctttccagaaagctcgtaaagcaaaggcacctagaagatgccatgagctggtagtgaggagacacaggaaggctcaaagatacgtagggtgcctcgagaagcatggccacttctgttgatgcccacttactctcatatttggtgctcccacccagggaatcatctgtttgtttcctttttgagtctctgccccgccctgcctcacccactctgtttctctgcctttcttctctatcttgtgacctctccctctggcataaggaattctttgatgtagttagtactactggcaccttgatttcattcgtttattcttcatgggctttttgttggtggaggttggttggtttgtttgaatgactagacgctgggctgtccttcccaggggaagatgaaactcccaggcaattctgtgatcagtcttgtttagtgtgtgtttctggcaggtaataacaccttgggagccatcaggctgcacatgataacagtgagaccctgaggcttcagccacttccagccagcaaactggtcactgcagccagtagcacagggcatagctctcagccatccacagcttcacacacaaagcaggaagagcaaaagagggccaggagctgcagccccacgctgggagcccggctgccagtccccttggggccaaagacccctcgaggggagttctgaaggggcatttcaactcagtgtctgtaactccaaacacacaagaaaggcaagaagggccctctccttctagctggaattccactttggagaaacacaaaagcccgtgggtttccgacctgggggtggtggcccgggacagagtcctttccatggtccctgtccatctttagctttatcctggtgcgttccctgccctttgtttgtcttcttctgctcagttcttctcctccatcacttctgtctctccactcacaccaaaccaaaatgggaattctgcttagaattgctttcaactacgcatacctcattcatttgctcttctgtctgaaagccatggcctctaccctcagcttctgtctatcccagctaacgtttgtttaaccttcgcctctcttagcaagtacctgttcattcagctttagaaggcttgcagcttaaaacatgtttgcctttggcctccttaaaatgtcttgccccgctgccatacccagtggctccaagattcagcacctcccgactcctcctgagatgtgcatttctcctggtgggaaggggagataaaaggatcgtgaggatccccccacacacacccttaacctacacctgctggctcctggccatgaagttggcgtcagatgtctccagcagcccctgacccctgccattcccagctctctctctgcaccagcctgaccacctcctcccaacctagatcacctccgaggtctctccctcaaagccccaccccttggtcttcctccacaccatgacaccccccaacagaaccagctgttgtgtcttgcaggtcaaattgagattggaggtagtacaagcggagaagcggagcatggggagggggtactggctggatggagaccttcaggtggcttggaatgaaatttatatcagatccacctccctaagttctggacaagacattttaaaaaatatagcaagggttctgtagcaggaccactatttagagactcacactcccatgacattacttttgacatctgtttcagaggtgcgtggaatcttagtgacactgaggtcatagcattgtctcaatggcagccattggaattgggcagccgttttctgtagggctaagaccagccttccctggaggagatcagaggtaatctgcacctttcaaaatcagcctgccaaggagaatgcagccatggcttatgcccccttcacaatgctctctggccacctgaccgcaggagagtattgtggaggacaactgggttgggtattccagcctagagatctactgctcagcccctgaatttctataattcttacccttggctgtgctttaaaaaaataataatttttaaaaaactttttttcgtatggtgaagagctatttttcaactaccttttaagtctccagagagaccatgtaatgtggcaaccaggaaacacatcctgcggcctcccacaccatcctggtgggaaaatcctccacctgggaggatcctgtctctgctggcctctggcattccctgagtatcgcccctcagcatcctaaatgtggcctagacctggcactccaatgaaaataagtgcatagtgagtgccttccagaaacaaagacttcatccactgaggtgttacttctcatttgaccctgaacttaattcagaaagacagctttccagagacctccctctcattagctgccctgcaccactcccctcctcactgccagttctgccaaaacaaggcaatctgcataagcatattgaaggaaggaaatcgtctttcctttctgtttgccctgagcctgttatctggaaccactaaccagagctcgctgtctctgaaaatgcccgacctctgcctcagatacggaataataacctcatttcatttatatcaattacgtgaacaaattaagttaattgccccaatatcatgaaatcattgaaaattaccagatcattagaaaacaaggatgaaagaattggctgctcagaaatttctccacgcctaccattagtggagacagtgccatatgaaaaatcagccagaatgttcaggttatgtaagcagctctgttggctgccctaaaaggggaatgcagtctccaggcttgggggtgtatgtcttcagggaatcctacggcccctttcttccccaagaaagaccacagatgggagaaactacaaactaactcagggcaccggcagcaaatctgggaaggggtcagagattaatggcccaagtattgatggctaccaacaaattctgaatttacatccaaaggtagaactgatgctttgtagtttctcaaggggctgtacttggtatttaaagagagtggcaaaccacagaaactaaaagtgctgatcctgggataccacagatgtccaactccagcaagtccaatctctccttccatctcagcaggggattcatttgccaaggcgaaagggtaccaaagactctaaggatgacgtgggatcatgtaggaaacgcccagggcatcagtagacctcgggggccttgggggcaggggctgtggcttaggctgcttcctattgttaccatgtagaaatcactcagggattgctctctgatttcatcgcgagtggttattcatttatgagaccacggaccttgtaaacagctcctcatgtggaaacaggtgtgagcggtggtagaggcaacagtgtcctagctactcaaaaatgccctgtgaacagcatggcttaaggctcaagaaaaacttaatctttgagtctctagattcttccaaagttggtctctttggagagttgtcattaccggggcaggagaatgccacacagacatctcagagcgtcctcattcttcctctttctactgtcctcatagctgctcctgactttctcttgtctgccattatagagacatgccataggaaatgttaaatcaatacatgttactaaaatacaaaatactatcaagattatctgaacagatccaaagtcaagtcttgaagtgaaatatgacttaaataaatgaggtcttaaatgggagctataaaatgcaacaagaaaaaagacagttaagacaaatgtttaaaaatcccaaatgaaggattctgaatgtttaagaagtaaaacaggttttttttggttttgttttgttttgtttttgtttttttgatgcctagaggttggttcaattaggccaggcaagccaagtacctgggtgcgttgtcagaattatctccattttggtcctgttcaggctgggattgacccagaagaccttcaagcatttgcccagggttcttagaagtgatgagcagctgtgatggttttcaggatggatccaagaggccagcaatggctcaagcttcctgggagctctgcccaacactcaggagttaacatggtgtaggttacctccctctggacctccctccctgccccactgaagcctgagaaacacagaactccttgtccatgagcaagggagctcaagcactgggccaggagcggggcagaaaggtgccagtggatagctagacctgaccatcctgggcaactatcacacaccagagcaaaaggggtttaggtgctttgccaagaaatttcttctgtgcatgcctgtatgagagagagagagagaaagagagagagagagagagagagtgtgtgtgtgcgcgtgtgtgtgtctgcctatgtttgtctctgtgttcaatctcagtctgctagccaaatcctagggaccccacaccctgcaatcacaaggactgacctggcaggtggaatcttcatgaagcagaagctgagatctagagatccagatttagagtgttctgtaaagcctagagaagtgtccctttctttctcctccctcacctcaccctatatctccaccatcccctaaaagggcatcctaccaactagctatgaaaaaaaaaagaatttgctgagaaatctgttacccaagaaatattttcaggctgcaagcaaatgtctagttgtgcacatttccatccttcaaaaattccataacacattttccttgtttgtaccttaaaaacagaaatacaagagcaaccatctgaaagtggagagtaaaagccaagtcctgactttctagaaagagttagcagctcagatggtcaagatcagtcggggctgagccctctgtgctggagcccaaaacgtaagggcaccttcccagatccaggctccaggaactcggggagagggctggccctgggatactcaccagaggccagtttcctcagctcctacccccaaatgagttcagcagtcagacccgtgagaacagcttcctggggtgttagtgtcctaaattgtgtgcagggctttcaagtttagaaaacaattcaacagtcattatttcatgccaacggtcagggctcgccgcacctatagaccaacagctaagcaaggccatctcctgcctgagcctgagctttcagaacaagccccattatggagtgggttgaggccacctctggaggccctcctcagtgttgacttgaagtcggtctcccctaaacctgagaggccactgcccttgctttgtttaaatatatgtgggcaaggataggctctggggtcagcaaggcctctgtccttcagctggccctgcctggggtaagctaaagtgcacaaagcctaagtcctcataggttaacaatggctaataaaaaacaaattaaaacaggcttggcacagtggcttacaccggtaatcccagtactttgggaggccaaggcaggaggatcgcttgaggccagcccacgagtttgagaccagcctgggcagtatagtgagaccctgtctctaaaaaaattaaaataaaaaatttaaattagccgggcatggtggcacgttcctatagtcctaactactagggaggctgatgtgggaggatcatttgagcccaggagttcaaggctgcagtgagctgtgattatgccactgcactccagcctgggcaacagagctgagaccctgtctctaaaaccaaaccaaacaaaaaaattataaacctccatccacaaaatcccaaagacctcatctgcttatctaataatattatgaatgtgagttatttaaagggcataggtaggagaatgcctgtgggtccttgattgacatgagacccagcaacacagaccccacactcatggggacgccccaggacctgccaggcctacgctttcacgtttctttcacttgtttccttttgccctcttctgccactgtgttgctcccgtgtcagccaagacctagaataccgggcatcttcatgggagactcattacagcttatctctatctgcctttctttaaagccagctgaacatacccaatgctctccctctatggtaagaccaaccctcccgaccatgctcccggcttccgtgtccccctctaacacccccactctccccaccccgaactccagagtccctgggagccctgcctggctctcactgcatgtggccactgtgtctgccgtgtgccttgcctgcctgttcccttctcgtgtgagctgtgaagatgctgtttgtgcagtggtggtgttttacccctgagctttccttggggtggtaattcactgtgatcttgactatctaacaagccactgggagagaatgggacccgaggtccatttcctgttaaacaccctgaggactccaccggccaaagcctctaaccttaatctgataggagaaatttgcagagggtacctatgagagccatggtagggctccagggtaaggagggaagacaggtgctctaggcaggagatggaagggtggacgatgattcctgttaatcagtgtctgtggctcctagcttccctgtgcttcaagtgaaaggccaccataaaaggtttcagctgggatttgttactgagcgcgtgattgaatttccagtcactccaaccttgctatcccttgcatttttctaaattcctgaagtccgttaaaattaggctgcagccactgttccgcagcaagctggaagcagaaaaacaagctccgttgattggaccactcctgttgtaggagtctctgattcgcgttggttgaagtgataaaagagacgccattcagtgtgaccttgaagcctccttggcccagccgcctccaaaaggctgccgttatgcatttctaaccgggccaagtatgagtttttagaaggaccagtggggttgattgaccaagccaccaagtctgcaggccgaggcaagcttgggtgggttgatgtgttccccagtgcagcctggcgctgcctggccacaaggctgccacaggaaaggctgagcccgggtgctctaccccgcttcctggggactctgcttctgggatcagccatctggatctgcctcctttttgcattgttatttggtttattagagcaaattggtgcatccgaatggcagtgagtttattctccttctcgagcagcattaggaaactgcagccacaggggagggctctgaacagtggaatggaattcacgctgcaagcttggtgtttggcgttttttgggtttttttgtttgtttattttgtttttttaactgagcagatccagatgcccctgtggcaccaacttctcaaactcttgacacttgcagctaaagttctccacttaagcttgttcttttttttctcctttctcgaacacggtggaactgacagctgagttataaaatcctaagcctcctctgcatactcctctggggaaacacaacctccttttaaggagtgaaaatagaagttcaagcagatacacaggtgatagaaatacagagattaaggtcatcaaaggcttcagaacacacaggcagggaagagcccagggcaggacagggctgctgcctgcagctcttgacccagcccctcaggtacccgtgcagcaggtcccgagtcccacctgtctgtcccctgccttgaggggaacgggagccttaggaggaactgaggcagctctaattttgaaatataagaaatatttttgctcttctcctgtttggaagatctggaaagcaggagaggtctctggcttgcttctgggcagagtggtggctgccttcgggtctccctgcttccctcataatctcctgtcctgcatagtgaggggagcggcctctgacgcctcatcagggtgggccagagcaggcagcgcagttagaagggctttagcgctggatattgccagtgagagtctgacctagaaataattaaagataaaaggcaaggtaaagcaaggagtggggagggcccaggtggccctagtaacaacctgagccctcccacctcgcgggaggtgtggacgggaccagtaacaggaagccccgagggtccattctctcccggtgcccgcaggtctgggtgagctgcactagctccggatttggcagtggcttcctcctgggttcctgctcaccaggccgatgtgggcaggaggagggccaagtggggagtcagctcatgttctcaggtttggaggcagaggaccgcagggcagcccgtcctgccccctgagccctggccaggcatgtgcccaagcccccaggctcccccaggtccaacagcagcagcccaagcacctccagtcaccttggcctgcactccacccttcctccccttcaccttccctctccccttccccagggcccctgagggagaccatctgcagaagcctcacttgcaagggaggcctcccctcccttacgctgcccctctcccttccagggtcttgtacagcctgaagggttggagcctcctagaggccccagggcagaggggagtaggagggcaacagcttcggagcaagggctgcaaaccagaccctctccagcactgagtagcacccgtaatccctccctttgggacaggggctgtggaaagtagaaggaggtgatacaaggaaagtgctggagtcccaagcagctggggcatgaggtccttcagggggcagcccaccaggacccccaaatccacgcatacctacagctgggagagaggccagccaccaacccacatcctcggagagtgctgggctccacttaggacacaggactgtctgcccagacaaacgggagacaggctaggactgcttcctcagcagtgcagaggaggggttcccagggcagctggctctgggcctagaagattccaaagcctatggtagttcctgatggagtcgtctgtcctccatccagggcattaagaactaggaatgaaggggaatcggggagaataaaaacacaggaccacagcccagcggcctgggcacagtctagctctgcagagaccatggggctgggctgtccactcattaaagtgggcggccgccctcccatcggagggggaagtctagtgcagcaaaccctggcctgccttccgccactgccactgaggtctgtatttctcggaggggccctcctgttctcacccccctcttgctgtgctaactgcacctcctgttgccgacgggttccagaacgcagaggaaaactcccgcatctccatcaccttcttccgcctgttccgggtcatgcgtctggtgaagctgctgagccgtggggagggcatccggacgctgctgtggaccttcatcaagtccttccaggtagccgcccctcatgtcctgcggcccggggaatcgcagggctgccgcgtggcccagaacacagctgacacaaggaggagccctccactctggggccctgctccttcctctgtgtggcagaactcggccgctctgcctggctccctgtttccgcaccgagaggcctagacgaagcatgtggtttccaaggcaggctcagagccccagaaggccaggtggtaaaggagggatgggagctaaggggaggcagaaagggtctgccttacttttaaccatcgtttatgtctttctgcacaagaatttactggacaaaggggttttgtggtaaggaacaaacctgaaaaacacgggcctggacaacctggtgaccgctatggcccttcgagttcagcatttccagaatctggccatcgccctcctccccgtaggcgtttcagcagcatctgctgacagcacctgtcatgtcctcggccagagtcgcaggaccctggtgtcctccgctcggctagagaggcccttcgaatgggcccaggactgcctggccatgtgatcagttcctccgctcagccattgttttcccattaaaacagagtgacaatcagcccctgccagctcggaggagtctttgtaggtttgaagttaaggagaagcaaagcgcttgggtcacttgacttcccccagatgagcgcagaacccgtgaaggcggtttcatgcttccctgggctggcggaacgcaggcttctctccccccatggaggggccgctctcagcctttccaagacgagaatctgtcagggaagatggtctttgtgtgccccaccctggccagtccctgcccggggacagggcatgcctgggcctggtccaggtgaggaaagatgcccgtccccgctctgcccccagcagcctcctgccagggactgaccatccaaggctctcgagggagctcccaatggccaggctgacccctgcctagtgatgagctggggctcctgcactctgagcccagctcagcccaggctctggggattcggaatagtagacaccagcggaagcaggactgccgctgactctgtacttgggtgcacgcggaacccacggctgtgagttgccatactctccctgcccccccgacatctcctggggctgggaagaggcacagaccgggtgactgcgagggcctgatggcggcgcaggcgttcgggccaggcagctggcgcctgctctgacggcaccctctagtgaccggtggccacggctgaagcggcgcccgggaacacgggctgggcctcccatcctggggaccatggcctgtccccagaagtcacgggggctctggaaaattagttgtctgagttgccaggcagataatgcatggagcgaatagagcgtatggaacccagctctgcaaggcattgcactaagcactttataagccttaaatcttttcaaccacaaaaccgctgagaggtattattattgtttccatttttctgatgaggagactgaagttcagagaagttaagtgccccaaccctcacagatagaaagtggcagaaacaggatttgaacccatgatctttcttttaaatttttccttattaaatgtttccattgcaatagtaatacccgctcactacaactagtgggatggaattaagctgtgtaaagaaagggtgtaacttgccaccaccccactcctccacaggtaaccacagtcagcggggtgctgtcctccacgatttctcctgcctcgtacagacacaccgcacatgtgtagtcggaggaggttttgctcgttcttgattgttttgcccaggtagtgtcgcactatatcgttactctgcggcctgctttgaaaaccaagctgaaatgggaagtcagttccggtttctcagaccttctcgcaggttccccgtagtcctgtgggactcttggaagtgtcccccggcccaaaccgggcaatagctgatggctgcagagacagggatgcggcgctccctgggaaggggcccagctggcctctgcactccagcctcatgggagtctcctgcacttccttccaggccctgccctatgtggccctcctgatcgtgatgctgttcttcatctacgcggtgatcgggatgcaggtagggaggctcccaccacggggctcctggcctcccgctctgtctctccccagttcccagcaccacattccctaacgccttcctccctcccttctccctttcattcctgactgtccctctccctcctcttccattttctgaggcccaaaaagccacaggaattggaactttccccaaatggatctcctgtaggtagcaggagaatgtcccggtacagaatacacagcccagagagcctccctccccgaggcctgggttctgctcttggtagaggaaagacactctccagttatgcaaggggcctcgggacagacacagccccttctcaagaaacagcagcaaggtgtgtctgtttgtgtccagcacccctgtttgtgtccaggtctgatgggcctgagagttaccccaaccagattcatttgaagctaatggctgagagggagggagggaagaaggaagcaaggaagggccaaatcaacacaaggttcaccgcatcaaatgtgcagcagttttctggggcctcccctcccaggtgcccactgcaccattcaccgcaaacctagggctctccattcccgtcttggggctccagcttgagtcccaaggccaaacttggcagggcgcccacactagcccaaagcgcttcctcggccgctccttcaggaagtcccctacttgctcatcgcagaaagacccaagattcagttgccaaaaccttttgagactaaaagagctaccttgatacctgataaaggtggcagtttctaagataagcacagctttaaaagaccaggaagaaaagggatttcaggaatgcattaagcttgccctagcctcagatcactcactccacatcactccaaaatgcaagaactaaatttgaaagagtgcttggacatgcagaactgaaatagcaaagaaaataacgcagtgcgtcctgtgtcctgtcagaagcaggatcccggtcccagcatccaccgctctcagccccagctcccactgggctgcagggaccttcctgaggctgtgggcactttgattctcatgcttgtccagtgtagggatttgggctcaggggctgggtggggcagcaggtgcctgccaggttgcatgggaagactgttcagcttgtggcagccagttccagggacacctgagacccctgaagagaccattgaacaatggtgggaaattaggaccctatctgtccacaaatcactgaacacctcttccttctctctcctaggtgtttgggaaaattgccctgaatgataccacagagatcaaccggaacaacaactttcagaccttcccccaggccgtgctgctcctcttcaggtgggtccctgaagacataggtgcacagatacacacacacctgcatggtgccacactgtggcctggtggtagaatgaaagggaactgcttcccggggagtaggaagggagaggatgtgttgcttgctctctgcctgacaaggaggccagtgggtccattgtcatttatgataactttccacagagcaacccactatgcactggcacacctgctggaaaccagacaaaaccattaggggagcaaaagtcacatgctaaaagcagcctggcttggaatctgaacaggcccaaagccaacctgccgacacgctttgtgaccttgagtgagatatctaacttctctgaacctcagttttcttgtccaataagtacagatatctatcactataccagcacctgtgccatttgccgtgctgggcgcttatgtccacatgcactgggcgtcatcctcacttaatcctcaacacaatactagcaaactgaatccaatagtacatgagaaagatgatacatcatgatcaagtgggtttcattccaggggtggttcaacatatgcacatcaataaatgtaagacaccatattaacagaatgaaggaaaaaagacccacatgatcatctcaatagatgcagaaaaagcatttgacaaaattcaacatcctttcatgataaaaactctcaacaaattaggcatagaaggatggtactgcaacacaataaaggccacgtatgacaaggccacagctaacatcatacttagtggtgaaaagttgaaagcttttcctttaagatgaggaacaagacaaagatgcccactctcaccacttctattcaacataataatactggaagtcctagccagagcaattaagcaagttttaaaaagttatccaaataggaaaggaagaagtgaaattttctctgtttgctgataacatgatcttatatatagaaaatcctaaagaccaccaaaatctattacaactgataaactaattcagtaaagttgcaggacacaaaatcaacccacaaaaatgagtagcatttatttacactaacaatgaactatctgaaagagaaattaagaaatcagtcccttttacaatagcatcaaaaaactaaaataaaatacttaggaataaatttaatgatctaaactgagaactcataaaacattgataaaagaaatagttggtgacacaaataaatggaaagatatcttgtgttcatggattggaataattaatattgttaaaatgaccatactacccaaagcaatctacaaattcaatgcaattgctatcaaaatgccaatgtcattttttatggaaatggaaaaaacaatcctaaaattcatatggaaccacaaaagaccctgaatagccaaagcaatcttgagcaagaagaacaaagctggaggcaccacaatgcatgatataaaaatctgttacaaagctacagtaaccaaaacagcatggtactggcataaaaacggacacatagagcaatggctcaggagagaaacctgagaaataaacccactcatttacagccagttgattttcgacaaaggtgccaagaacacacagtggagaaagaacagccttgttaataaatagtgttgccaaagaggaaaaagggaattactttcaaaatcatcattagcattagacttctcattaacaaaagtatatatgtaatagaagacaatggaataatatgttcaaaattatgaggaaaaatgtatttttgaatctggccctctaaatacagtctaatcagcattccagtagtcaagcaaaatagagacatttccaagtgtttaaggacccataaagtttactccccaacataagtcttccctggagcaattactcaggctgtacttccacagaatgaaaaatgaatcaaagaaatagaatgagcagagtaatgatatgagtaaaaaataatgaagtttatagttatgagttatgaacaaggacattataaagtttatataaagtctagatacttgttaaggggaaaatgtacaaaaccttaatgacaatttggaagtaatattttatgttatctctacaaggtaggaagtgaggtggtagaagaatgagaaacatgaaaccatgctaagattcttctcttgtttggggataagagtatatactgtttaattctgtacataactaagggaaaagtgtgtatacatatatatgttaaagatttaaaggtcaatcactaaaaaaatagaaatggaatgtatatattctaaaccactagaggaaaaaaatggatggataaaacttagcaatccatcaaaaggaagctaaagtaaaagtagaaaaataaataaaacatggaaattagaataataaaatgagatggcaggaataagaacaaagataataattgctaaacttattgaggtaaagttcactattaaaacatagatactctgatgttggctttaagaaatctagctctagcctgtttataacagctacagtaaaacaaaatggcctaaagaaaatgcaaataaaaggatggaaaaacgaataccatgtaaggctcacaatgtagacgtaataatagcagtagcagaagaaatagaattccaggtgaaaggcattaaacaagacaaagagggattttatattgataaaaggtataatccatcaaaaatatataatagtcataaaactacatgagcctaacaatatagtttggaaatgtatcaattacataccaatagaagtataaggagaacacacacacacacacacagtggaagatttaatacaggtagagcatgacagaccaaatagaccaaaatagaaaaaagggtaaagaatatctaaataatacaattaacagacttgaacttatcgagttatactcagtaaatggccaaaaaaaacacattctttttaaacacctcagaaacattcacaaaaattagccaagatttaagtcacaaagaatttaacaaattctacaactgcccctactttgatatagccaaattagaaattagccataaaaacaaaaacccctccaaaatctacttaaaaatttggcactcttcttagtaactcaaagctgaaactacaatctacagtcatgcaccacatgatgacatttcagccaatgacagactgcctaaaattaaaatggagctgaaaacttcctatcacccagtgacgctatagcatcaaaatgcagtgcagtgccttactcaggtgttcgtggtgctgccagtcatagataagtatggcccatacaattatgtacagtacataatatttgataatgagaataaatgactgtgtcaccggtttatgtctttactgcactatacttttatcattattttgcagtgtactgcttctacttatttttttttaagttaaccgtaaaacagccttaggcaggtcctgcaggaggtattccagaagaaggcattgttatcataggagatgacagctccatgcatgttagtgcccctgaagaccttccgataggacaagatgtggaggtggaagacagtgatgttgatgatcctgaccttgagtaggcctaggctaatgtgtgggtttgtgtctcagcttttaacaaaaagctaaaattaaaaaaaaaaagttcaatattaaaaaaacataaaataaggatatgaagaaaaatattctgcacagctgtacaatgtgtattttaagttgcgttattacaaaagagtccaaaagttaaaaaaaatttaaaagtttataaagtaaaaatgttacattaagctgaagttaatttattactgaagaaagaaaagtactttttataaatttgtgtagcctaagtttatagtgtttctagtctccagtggtgtacggtagcgtgcagtcatgtcctaggccctcacagtcactcaccactcactcactgccccacccagaacaactttcagtcctgcaagctccactcatggtatgtgccctctacaggtgcaccgtatttaaatattttttactgttccttttttactgttcctatttttactgttccttttcagtgtttagatatgtttagatacacaaatacttaccattgtgttccagtttcctgcaatattcagtacagtcacatgctgtataagcttgtagcctaggagcagtaggctgtaccacagagctgaggtgtgtaatagctacggcatctaggtttgtgtgagtccactctatgctgtttgcacaacagaattgcctaaccatgcatctccccactgttaagtgacacaggactgtacttagaaatgagggccagggcaccagatcttaaacgtatgagatgcatcaatcagcaccaaagaaaaaattcagagcctgaaatttatttatttatctaaaaagctgtatattaaataagctaatagatggggaaaagaatagtaaaataatcccagaatatgaaggaatgcatttttaaaaataaaagcataaattaataaaatatggattttatcaataaaccctaaagctgatcctttgaaaagaccaataaacagacaaaccatcaaatccaatttttttaaaaaaaaacacaacaacatcagaaatgcaaaaagcaacataattacagatgtggaagtgatttttagaatgataagagaatttcatgcctctgttttgtggcacttcagaggtgatcatctacttcaagatgaagcagaaagtctccttcccagccagtggctgccagaaactcattgaagtggacagtgaatgcaaaccataccttttatgagaagcatatggcctcagaagtcgctggtgccactctgggtgaagaatggaaggcttatgtgggtggaatcaatggtacaaatgacaagcgaggtttccctatgaagcagtgtgtcctgacctgtggttgtgtccacctgctactgcatacggggcattctgttatagaccaaggagaactgcagaaggaaagcacagattgttcagagttgcattgtgggtgccagtctgacttcttaatttggtttttgtacaaaaagatgggggggagagaaagatatttctagactgactgatactactgtgccttttcacctggggtccaaaagagatggcacggtccgataacttttcattctccataaagatgatgtccatcagtgagtaaacccctaaacaaaggatgtcaggaacccaggaccaaagcacccaagactcggcatcttcttactccacatgtcctgcaacacaaatgctgacgtattgctctgaagaaacagaacactaaaaaaaaaaataagtaaggcccggtgcggtggctcacacctgtaatcctagcactttggaaagccgaggcaggtggatcatgaggtcaggagttcgagaccagcctggccaagatggtgaaaccccatctctactaaaaatacaaaaattagccaggcacggtggcgggcacctgtaatcccagctactcgggaggctgaggcaggagaattgcttgaacccgggaggtggaggttgcagtgagccgagattgttccactacactctagcctgggcgacagagcaagactctgtctccaaataaataaatataaggaagaggttaaacaatatgctaaacttttggccaagagaatgaaggagaccaaagaaaaatgccaggaacagatttccaagacatggaggctatgctcactgagagcttctgagtctatcaaaaataagattttcaccaggcatggcagctcacacctgtaatctcaacaacttgggaggctgaggtgggaggatcagttaagaccaggagtatgagaccagcctgagcaacacagcaaaaccccatctctaaaaataaaaaataaaaatattagccaggtgtggtgccatgtgcctgtagtcccagctacttgagaagctgtagcgggaggatcacttgggcccaggagtttgaggttacagtgagctaagatggctccactgcactccagcctgggtgatgaagtgacatcccatctctaaacacatacacacacatacacacacacacacacacacacacacacacacacaagatttttctaagagtagcagacaaataatatcagacttttaaaaagaagacagagaacatcatgaacaaatatgcaaatatatttgaaaacctaaatgaagcagacgcttttatgtagaaaataagaattataaaattatcttaagaattaaaaaaaaacaactacaacagaaattgaaaaggtagttgaaaatttagcctttgaaaaggcccaaggttcaatatttttatttgtgaggtctaccagactatcaaggagtggatcattccaatgttatataaactttccaggaacagaaagatgtagaaaacctcttcacccactccataagactaatataaagctaatgccaatgagaaaaagagaaaaaagcaagcagttataaatatgaaaatatgtacacataattgtcattgtttgcagacaacaggctaattcaagtagaaaatccatgcaaattaactaaaaaccctttaggacaatagaattaataaagtggaagattaaaagattaacaaagaaaaataattgctttcctgtactggtaataactaattagtaaatgtaatagacaagatcttatgctatcactttttcaatgttattattttgtaactcttacccaataaaataagacaggaaaggccgggcgcagtggctcacgcctgtaatcccagcacttcgggaggccaaggcgggtggatcacgaggtcaggagatcgagaccatcctggctaacaccgtgaaaccccgtctctactaaaaatacaaaaaattagccgggcgtggtagcaggcgcctgtagtcccagctactcaggaggctaaggtgggagaatctcttgaacccaggagatggaggttgcagtgagccaagattgcgccactgcactgcagtctgggggacagagaaagaccccatctcaaaaaaaaaaaacaagacaggaaaaataaatcaaaggataagaattggagaggaagaaacaaaattaaatgccaaaaaagttgattgcctgtgtatatatacaagaaaaattacagaaaattgctaaaactgataggatagtttagcaaatattctgtaatatgaaatcaattgtattccctctatatcagcagcaaatggacatagcttttaaaatataatgttgaaactataccattttaaatgtacaacaaaataaaaggagagagatgccacgtttctggccaggagacttaatatcataaagatgtcaggattctgcaaatgaattgacatctcagtgcaattctaataagactcccaacaggattattcacagaggctgaaactgattctacagtgtctatggaatagaaaaggaaactgaatagccaagacaaatgttgaagaacaacaggttggcaggactcctgcactgtgagagggcaggacttactataaggcaacttactatgcagacaacacagtacttctgtaccaagataaacaaataaacctgaggaatgcaatgacaaggctagaacaagacccacacatctacgcaaatacaacttacggcagaagaaatatttcaattaagtaggtgaagatgtactattcaataaatagtattaacaaaatgacttatctatgcagaaaaaataaaagcatatttctacctcatatcaaacatgaaaataaatttcaggtcaataagttattgcggaaaaacaaaactttagaacctttagaagaacacagaaaagaatgtctttatgacctaaaatagagaaagattttttaaacgtgatgcaaaaagcacagaacatagaggaaaaaactataaatttgacctcattgaaataaaaaacttagattcaccaaaatacaccgtaaataataccagagacaacccacaaattggaagaagatatttctgttgcatataactaacaaagggttaagaatagacacgaaaccaccatgagactccaccttcctcctgcaagaatggctgcaatttaaaaaataaaaaataatagatgttggcatggatgtggtggaaagggaacacttttaccccgctggtgggaatgtgaactagtacagccactatggaaaacagtatgaagattccttaaagaactaaaagtagacctaccattccatccagcagtcccactcctgggtatccacccagaggaaaagaagtcattatgtgaaagagacacctgcacacacacatttatagcagcaccatttgcaaaatgatgtaatggactttggggactcggagaagggcaggaggatggtagggatcaaagacgactgcttgggtgatgggtgcagcgaaatgtcagagatcaccactgaagggcttgtccgtgtaagcaaaaaccacctgttcccaaaaaactattggaaattttaaaaaagaatagagaatagagtatcttttttttttttttttttttttttgagacggagtctcgctctgtcgcccaggctggagtacagtggtgtgatctcggctcactgcaaactccgcctcccgggttcacgccattctcctgcctcagcttcccaagtagctgggactacaggcgcccaccaccgcgcccggctaatttttgtatttttagtagagacgaggcttcaccatgttagccaggatggtctccatctcctgacctcgtgatccgcccacctcggcctcccaaagtgctgggattacaggcgtgagccaccgcgcccggccagagaatagagtatcttaagcaccctacaaacgaacaagaagacaacctgaatcaaacaagcaaaaacatgaacatgcaatttaatggaagataaaatttaagttctcaacccactaatcattttataaccaaattaaaacagcagtgacatattatctcacacaaattatatgagcaacatttaaaacaattcactaatgaactgatgagtttgtacagtagtgttatttctcctacactggtaataggagtctaagttggacaaatccttggaggtcatggaatatctagtaaaaataaagatgcatgtagtttaactggcaattccacttctaagtggatacccaagatataaatctgcatgtttattgcagtgttatttgtactagtaaaagaaaaaatgaaaaacctaaatgttccttaacaggacagtggatttttttacggtaagttcatagagcatactcctgtacagcagttaaggtgaatgaactggaactaaaatacatccaaagggctaagtctcaaaaacatcacatggattgcaaaaacagcaagttttcggaaaaggtgcaatttgttactgtttatataaaattttaataatgctatgtgtttcatatttagcaaatatatcagagcattcagggaatgatgaacatcaagttcattttagtaactccctctggggaaggaggaaagggacaggtggggagggatgcagagggccctccttggcatctgtaggatgggctgcatgaacgtggctctccctcccctccaggtgtgccaccggggaggcctggcaggacatcatgctggcctgcatgccaggcaagaagtgtgccccagagtccgagcccagcaacagcacggagggtgaaacaccctgtggtagcagctttgctgtcttctacttcatcagcttctacatgctctgtgccttcctggtaagccaagggggaactcaacagccagcagccatgactgcccagttccagggcagtctgaaccgtccatctctgcagctcatggtcagggcaaccctatcagaggagctggcttgggaagactaagttggcaggagtgtccagccacatggagagaaaggcagaaagccctgggccagagtgagctccaccagcatcttgcttgtctgttcttggctgttgtcatggtggcattgtcccagaggacaacggggacatgtgggggcctagaaagaactgtacttttttggcatcttgctgaggagtgaggaaaaggggataaagtccccctctgtcctgcacagccctgcccagcagctcggtaggagggaagctgtccagcccacctgtgggttcatcacacacaactctcagggaaactgtgtcaagtttatgtccaagagacccaggttctcaggctggtaggatggatgactggtctttagaaatgttggcttctgccatcagtaggccccagctggcaagggggttccagaggcaggtgtgtaggaaggtcttctcacagcacctcattgtactgttccccacagatcatcaacctctttgtagctgtcatcatggacaactttgactacctgacaagggactggtccatccttggtccccaccacctggatgagtttaaaagaatctgggcagagtatgaccctgaagccaagtaagttcccagagggaaatcctgattccccaagctgagagagggtatagctgaccatacctgcaggaggggctcaaggttggccaacactgggtggatcaattagaaacactggattgtatcacaccctagggtgaaaggtcaagggccagcaggaggaggcccggcaccttcaattaagtcaagaatgtatctactaggttgggtggggtggctcacacctgtaatcccagcattttagaaggcaaaggtggttgaatcactcgaggccaggagttcaagaccagcctggccaacacagtgaaccccatctctactaaaaatacaaaaattagccggacatggtggcacatgcctataatcccagctactcaggaggccaaggcatgagaattgcctgaacctgggaggtggaggttgcagcgagctgagatcacaccactgcactccagcctgggcgacagagcaagactccatctaaaaaagaaaaagaaaataatatatctactatattcagttgaatggaaggataggaaattctagtatcaggaataactagtaagtgctcaagttaggataggtagggccggggaaaatcttgattccattcccgcttctggtctaaagatcaatcacattcggctgaccctcagtaaataccttttggtcagaaggttagttcattcaatcagcaagtatatattgagaattttgttgcactgctaaaatcccttccaccttgaacatagcatgggcagaaaatgattcattaaaatctaaacacgtgtatatgtatattggtttggggctgtgtcatgcaattctgcaactctgtactgagtgtgactaatagggctaccacactgtgcagtgttgcccatatgagtgggccctacccctcaggcgcatgcgtcctgggctgctggcagagaccgtggctctctgatgccctgtccctcctctccctcctcttctaggggtcgtatcaaacacctggatgtggtgaccctcctccggcggattcagccgccactaggttttgggaagctgtgccctcaccgcgtggcttgcaaagtaagagataacggggttcatgggagggagagggaaaataggggaagtgaagtgcccatttcttgtgatcctttaagggaatgaacatactagtttatgtgcctaaagattacattttaagggtccttccagctctaaattctcagactctatgagggaataacagagtgaatgcctcctgtcctactgagccagggacccagtcctggataaaggacttgttcagtccatcccactgcaccatccgggcatcctggggtgggagacttcccagcctaggctagaggggttcggcgttcttttcctggagttggaaggccattagaaagcccaggcattgacttcaggggtctttgagtcctaaaatttttcataaaatcactaaaatacaaagtttaccagggagaggatttctcactttaatcagattccttagtgagaccatgacccaaaaaaaaagtgtcgtttccttttctccctcccctccaccatggccactccacgctccttttctccctcctctccaccgtggccattccgtgctccttgttggggcaataatgagctgacagagagctgggggaagggagaccagagggctggagagaggaggaaactcagatggcaggaggattcggctctgtgagaatccactcatggaaaacgcagattgagggaacatagaaccttctacttgtgctctgtttactgagtttcttctcatttgtgcctccactttgctccaaaaacaaacaaacaacaacaacaacaaaaacagattttaagagatttccaagggcatagaaaatatcagaaaagagcataaaataaatgcaaggtacaaacaccatgcaaggcaagggtggggaggggtgcagcctggagggggctaaagtgcgtccgttgtggcctccggacgggcctgggcaggctgaagcctgggtgcgaaactttccggtggccaagatacagttcacaccgtccatgaggctcatcaagatctggtcactcaggagaagtgtaacccttctagacactgagattagcaggaggtcaccgtgtgagctgacaaatagccccccttgagcatgcccttggcatggacgctgtggtgagcttcacaccgcgcttgctcgtcatgacccattgcatgctgaaggccccacaccagagctccgtgccagggaagcctgttctgggggtgtgtgctgggaaagaagagggcaagacagcactatccagtgtcagcaagcttctgctccaacttgatgcagaagcatatttgtcaatacacagagaggacatgtagcatctcctgcaggcaaagctcctgtgatcctttctcttctctgggctgtggacgaatgctgcctggcaggtgggctcccagcacatgctggcgtacagccggtctttgctgccagtggagagcacacctgcacgcctgagcagactttcgagcagggcgcaaagttgggtggccttcacatccttttgtggaagtgaaggtctaatgaggacaaatttcatacctctcccactccacgaggagggtcaaaagtagttgtggcaaaggcaagattctccctggaatgcttcagggagcattcactccctgcccactccagcaacacccacacaagctgcgtgtcacccccagcatcctctgtgtattaggccatccttgcactgctgtaaagaaatacctgagactgggtaatttataagaaaacaggtttaattggcccacagttcagcaggctgtacaggaagcatggcactagcattctgcttctggggaggcctcaggaagcttccaatcaatcatggtggaaggcaaaggggaggcaggtacgtcacatggacagacagggagcaagagagaagggggagggaccacacacttacttaaacaagcagatctcatgagtactcactcaccaaggggatggtaccaaaccatttatgagaaatccaccccatgatgcaatcaccttccatcaggccccacctccaattctggggattacaattcaacatgagatttgggcgaggacacagagccaaaccatatcactctgccacggtgttctgcggtcccctaagcaccgcctgccatcatcaccagctttgcttctcttcgcctgcagcgcctggtctccatgaacatgcctctgaacagcgacgggacagtcatgttcaatgccaccctgtttgccctggtcaggacggccctgaggatcaaaacagaaggtaaggtcgcccgtgggcactgggagagacactcagaaggtctagcagacaatcagagaggagctcggcagcctgcaaagtgctcaagggaacttcctgccccagacagcatccgagctgggatacgggggtaacgtgcgctccaggacatcgcagggccccagcctgctcatgacttctttgctcctgaatggtctccctgcctctagctcaggggtttccaatcttttggcttctctgggccacattggaagaattgtcttgggccacacataaaatacactaacgatagctgatgaactgaaaaaaaaaattgcaaaatactcaatgttttaagaaagtttacgaatatgtgttgggccacattcaaagccgtcctgggccgcatgtggcccatgggctgcaggttagacaagcctgctctagcttattcattttgaactctagctttccatgaaactctgggactcattctgggtggtatcttgaagtcagagggtatagctcacaaaacagaaggagacgggtgttacctgaagcaggaccaacccctgtctaaaagaacttacactggctacaggtgggtgtctcaaatgctcaactcattaaattaataggactgtgctgggaagacgtgtgggaaaggggacacagtgacaagtggtggccgtggtggaggtcatcgcacacattgtgcgggctgagcctggcttaaggctcttagccagcggacaggtgaggattcagacctcacctgtgccacctagtcagaccgggctccctcagggctgcgtccacctggaggggcccttctagttttcacaaggcaccctaagggctagcagcagcctgagtgagataatctgcttgctttatgatggataagagtttgcgaaccactatgggaaaggctgtattaaacacacctaacaagataccatttctctccaagagtgtccagccttggagtgtctagtgtttcttagagcgtggtcaaaagaccaccgctgcagaatcagctttgggtacctgtttaagctactgagtcccaggcacccacacagacctgctgatgccaaatccctgagcatggggcccaggaatctgcatcttgaaccaactacagagatgattcaaacccactggtgtagtaattacagaaaacacagatgagacaagcagtatgcttccttccccttcctacacttccagcttaaagctcaggctgtccgtcagtgtgttcctcggggcaacagaaggagccccgggcaggtgggaggctcgaatccgagtccctgctctctcactaatgacatgagtatgagccatttactctctctctacttcagttgctccattggtagactagagaaaggtgatgacatctgggaatttaattcattgaataacccagacatgggccttctctccgttagatccttcaaaaacaataacagaaacatttcaaatgaagtgaaacaagaaccagtccaccaagacacaagtcaaaataattagctgatttttaaaaaataaaaataggggccaggcgtgctggctcgtgcctgtaattccagcactttgagaggcccagtcgggcagatcccgaggtcaggagattgagaccatcctggccaacatggtgaaacctcgtctctactaaaaatacaaaaattagccgggcgtggtggcacgtgcctgtaatcccagctactcaggaggctgaggcaggagaatcgcttgaacctgggaggcagaggttgcagtgagccgagatcaccccactctagcctgggcgacagagtgaggctccatctgaaaaaataaaataaaataataaaaataggacaagttctgctactaaattaaaaaaaaaaaaaagagcaaaggcttaaaaaatataccatcagtagccaatgcaatcactcaatctgaaatgggtgtaaataggcctatttctgactgccagaaaaccaaaacacactttttttttttttttaaatggaatctcgctctgtcgccaggctggagtgcagtggcacaatctcggcctgctgcaacctctgactccctagttcaagccattctcctgcctcagcctctcaagtagctgggattacaggcacgtgccaccacgcccggctaatttttgtatttttagtagagacagggtttcaccatgttggccaggatggtctcaatctcctgaccttgtgatctgcccgactgggcctcccaaagtgctgggatgacaggcatgagccaccgcgcccggccaaaacacacatttaattcacacatatgtgtgtataacaaggaagaaaactgggaaggaaatgtgttcgtatgctaacactgattatcatgagtagaaagatcagcagtgacatccaccttactcctttagtttttttactttccaaatgttctgcaaggaatgttactcccctatgttcagagggaaggagaggcgatataaatgactgccaggaggaatatgctgtaatacttaaagattgatgtaaattaaggatgtgagattttgttccctagaggaacaaaaggcagggaggtatggaagcaagaattcagcagggtcgaaggttcactgtcaaagccaaccacatgccaactaaggaagaccaatagctagtaacaatgcgaaagactgaccagtcaaatgcagggacccaattctgaggaaataagagttccagagaaaagaggagaagccagccatgtgggaactacaatcctgtcaagaattacagactatcttttaaacacaaagacatttcagaacagctaccaaagggcccgaaacgcccccacccaagggtgagccttcatcagacatgggccctccataaacttgttaaaatcgaaacgcccccacccaagggtgagccttcatcagacacgggccctccacaaacttgttaaaatcctaagaaagaaagacaaagtcaagtcttggaagcaactagaaagaaatgtgagaagacatctacatttgtgaagatgaggcttgcatcagtcctcacccttcagacttctcagcgtggaaggaattggggcgaaattaacacctacctcagagaagcagagctgtcatcccaagtccagtaccaagccaaagaagcttctctcttggaacgtagaaggaagagctctcatcccaagtccagtaccaagccaaacaagcttctctcttggaacataaaaggaagatagtgaaaaatacttagatgacatgaaacaattgtcggtgaacttcaacaattacatagaccatcatgagaataaattaaggctgataaaaaaaaatgaaaggtccttttggaaactatgttaatttcttaggtctgctgtaacaaatgatcacaaactgggcagctggaaacaagagaaagttctctcagtttaggagaccagagacctaaaactaaggtgtcagcagagttggttctttctggaggctctggggagagtctgttccaccctttctcccagattctgagggctgtggatgatgcctggtgtgcactggctcacagcacatcacgccatctgtgcctccatcttcaaatagcctccagggtcttgtgtcctctcctcttcttggaaggacaccagccacattggacttagggcccaccctcatccaggatgacctcaccttaactaattacattggtgaaaatcctatttccaactaaggccacattctgaggttctaggcagacatgaattttgggaggacactattcagcccagtaccgaagctaagtatatttgaataccatgtgtgttaggatcttgcactgcgtgtgtcagaaacctccagctacctctcccgtgatggggactgatcatctgtgcagctggaaggcccaggagtcgtcccctgccttcaggtcctgtttggatctggcatttggggagctcgggattccgtcaatccctctactgccacctctgcatgctctgccctgtggccccagaggtggatttgaacccaggcagtctgacacaagagccctcaaccacaatactggactgccggtcctatgcgagagcagtaaacatcccgtgttggtttcctactgctgcaaagcaaattactacaagcttttcagcttaaaaagacaccccgttggctgggcacggtggctcacacatgtaatcccagcactttgggaggctgaggcaggtagattacctgaggttgggagttcgagaccaacatggagaaaccccatctctactaaaaatataaaattagctgggcatggtggcccatgcctgtaatcccagctacttgggaggctgaggcaggagaatcacttgaacccaggaggtggaggttgcagtgagccaagatcgcgccattgcactccagcctgggcaacaagagcaaacttccgtctaaaaaaaaaaaaaaaaaaagacaccccgttagtagctcatggttttgcaggtcagaagtccagcagtggtgaagctgggctttcataaggcaaatccaggatattgatcaggccatggtctcttctggaggctctgggggagatcatgttgttggtggaattcatttgttgcaattgtaggcctgagatcctcactttcctgctggctgacagctggggaccccctctgctcctagaggctgcctctctcagttcagcccacatgactgtttgctttcttccaggccggctggagagaactctgcctttaaagggctcatgtgactaggtcaggcctgcctaacctccctgtcttaggtcataggtgccgtgtgccatataacctaatctcaggagtaaaatctatgatggtcaggggcccagggctttggcagcatgtgtaccctgatgaggagcatcttagaatcctgtcccctacatctgcccttacagctgtaaggctcagctttcctttttcatcactgtaaggctaggaccccagaggctgcataaggcaggcatctaagtaggggaactcgggacagagccctcatcgacagatgtaccctccaatcatccatgttccctgtgactgccgaaggaggtccatgagaaatgccacccatggggaccagccccccactgcccgtggcagggccatacgtgttccagctggtgagcgcatggccgccattgttcctgcccaggggctgggctcagtctacaaggaagagcactgagtgccggtggaggggccccctggctggcctgagccacaggcagggggaaggggacaggaatggcattggacggggcacaagagggaagggggaaggaaggaaggtggacagaggaaggggaagaggaaggaggtggaaaatgggaagactggggagaagtgaagcaagcaagaaagaaactgatgagtcagggttgcgtggggcagatgccaccatctgtggcttcctaccttacgcagagggacccagcccatcagaggcccaccaaggggctgaggatcctttccgccctgcagggaacctagaacaagccaatgaggagctgcgggcgatcatcaagaagatctggaagcggaccagcatgaagctgctggaccaggtggtgccccctgcaggtggtgagtgctccctggactcccgcaccttggccactgcctggccgtgcccccctctgcctgcctctcctccagctgtggcacccttagaatgcggaagcatcccctgagacttgcttcttgagtcccctaggcttgctggaggtctgccttcagacccttcctgtggggctcagaggccctgttggttagaagggaggcaggtgcaacgccctgcacaaactcagaaacagaaagtcaggttggaaatctggtacaaccctgctttttacatagggtaacaggcaagtccctgatgcttaggggtttggcagaacttctaaagaaactccacaaagtataggtttcccataaacctgattgctgtaggattgctctaaggccctcaaacgagaatcccctgagattcctcccctcttggatgacattctttttgttcttccaagagcagtgtttcttgaccctatcaagcctcaaatccctttttatagcaaagagtttatattgcctttactatgatcctgaatgaaaattataggtaatataactttcctatacatataatttccaaaatattaatataatgccttcactctaacataaaatctattaaaagcagatgtttccaatatgtaaatactcaggcataactataccagcaggtacatttaattgatgagatcttctcatgcacccacttacaacacatacggctgggttcacaggaaacaagacaatactgaatactgtcaacactttgatttgccattttgaaataaggggtaaatcagtatattaaataagtgtgtgtataaatagccccccacacataaacacacacacatacttacacatatgcagaacaaccgtgatgtgacacttacggtgagtgacccacacaccctaaagagcattgccatcaggaatacagttttccaaaatgcgaacctctcttggccaagtttaaataatccaaagtatagttttcctcaatttacacagcagttgtattcctggaaattgtcaggtgtgttaaaaccatgcaaaacaatgtcctgtgttcatttgcaaaatgaaattatgttccgagcccagagactcctaagcagaatcatggatgtgtggcataagcttgagagccatgcagagtgcaaagctgtgattgcagaacatgcctgcactttaagggacaggtctggagctacttaatgctagtggcacccccacagtaccccgacaactaaaaaccaccccacacatttactgtgccctccttaagaggcgacaccacttgtgttgagaaccatttgccagagggaaagccggatttgggctaagcgaaaatctcgccagtgccatgtgatgtttacatacatcgttttattgaatcctgacaacatttctgtgaagtttgctcagggaactaaagttcttagaagctaagttgctggcccaaggttacctggagagtccacagcagattcaggattcaaacccaggccccagggaacctaggactccaggtaggactccaggcttgtcccaccatgcagttcttccttcctgactatgctggacaggggaccctgggtttttccctcccacgtggaaagggggtgcttgccagagaagggaggggtcatcactgctatggatgtggctattttggagggacaggtaggaggaggagaaccctcaccagcccctagatttaatccccagctgtctcttgggcccgtggcatctcttcacaaagaaccaggaggtagatccaaggggctcctccccaggcatgaaatgtttcctctaagaacttatggcttctccaccatcaggtttactcccaggaaagggactgatgatgtcacatataatcttgggtatccagcccagcagggatgcagccaagccacctggcacaaaaactcaatcgggtttgaaagaaaaatccaaacttccatgggaagaaagccctccttccaccagcccctccctccgagctaagctgaaccgttttgcacttgcacttggaagagtggccagttgatgagggacatttgaagctctggaatcaaatgtatcagttcagttaaaaaaaaaaaagcgggaaataattttgatggtaggctaccttttgcataaaaaaaacaggagataatatgtttgatgatttacataactaatttgcactaagaatctctgagaaaatactcaagaaactagatgatctacaggaggtggtgactaggcagataagggctgtggtgggagagacttttgaccataagcctttttatggttttttttctctctttttaagccatgtgaatgtattacctctccaaaaatattaaagttttaaaaagttttggatgctgaaaaaaaaaatgaatgaagttcaactgaattcccctgctcccctcttaccccctctcccctctccatacgtctcagatgatgaggtcaccgttggcaagttctacgccacgttcctgatccaggagtacttccggaagttcaagaagcgcaaagagcagggccttgtgggcaagccctcccagaggaacgcgctgtctctgcaggtgagggcctgggggcgggcccacactccaggaaggtcctggtcattgcctctgacctccagtcagggtcccggtccctccccagcaggctggaggccaggtccctgcagagggaacctttcagagagctccagacctttccaaagatggctgtgagaagggggtgatgtgcccttccctacctgccacccaccgactgccctccatggttctgcctgctgtcatagcccccagatctctcaaatacttcactgaggctcccgtgacagcccctgacccctggtgccccgtcctaatgagccttcatccctcctggatgggcgagtggattgttccatcagagggcagcccagcccccagttcacacacacacaaaccttccggagggtcgactggctgggtggaggatgccagggccctggagggacaggtcttggcccgaggctgtggctggctggggagcttggaggaaagggagcgtggtcctcaccatcctccccttggattccaggctggcttgcgcacactgcatgacatcgggcctgagatccgacgggccatctctggagatctcaccgctgaggaggagctggacaaggccatgaaggaggctgtgtccgctgcttctgaagatgacatcttcagggtgggtggtgccatggcgcactctcgacccctataaagttcagtttggagcaagaggttgggctggggttttgcggggaacgtccaggggaaggagctgcaccagaggaaagggctacttccaggctcttcctgatgagctgtctcctcacccctttgccttttccaagcctgactccatcccaaggcagggctccctggaaacagcagctctcagtgtcactggctctcagagaagcgggaaggaaccgccttcctaagggaaatgtttcctaggagaaacttctgcattagaagttgcagagtggtcacccctggggcacatctaatctgcaggcttgttttgtttgttaatatttgaaaatcaagacttctggcattctttggaaaagtcaggagacctggtaatattaagcttgcattcccacagggcagcagagggccggagcctagaggcggtggccctttgagatggagcatagcgtgtgttctccaggtctccaagacccctccagaactcccctttccctctcctttcctggagactgaagctgcccagcagttgcaatagtgaaaattaaaacggctgtaccagaataaggggcgtttatcactcatttgtgttgcctgcctcaccacgctggtgtttggttacaaatccttctatagcaagggagaagctgccagccataattgtgcaggaccctgctcacaccgctctctcccggccgcgggcccagttcccaggctgtggaacacacagggggcaagctgagcccatcctgcccctgctccgtctcttcctcatccttattcttgtcactgggagacattcgtcactgagtggcctcagggacatggcatggtggtgacacaacccgacaagacaccagaaaccaaagcctcagtcaccaaggcccagggatgctctgatgtcaagggttggaacaaccgtgcaaatagctacttgcccacttccccaggacaaggaaaagaatactggggaaaaacattggctcctggttttaaatctctctgagtccccgaggggaaaaagaccatcatgcaggaaattcttcattttcaaaaccgtttggccaaccagcttttagctctgtgagcacactgggtttccattttttaaatctggttagaatcttctggtcgctctcccagcccccgccctcacggtgtgctggctgctcttagggaccaccatcctagacgtgccctggaaactcactcccagccttcaggggcttcactggaaacctccagggcagctcgtaccagcggcagccccttgcccaatcccatccccactggtgggtgggttctcccagctgctgcagaggggagtccagagccttgagactccgggtccctccctctctggagcagccaggcatgaagaaggtcctcaggtgctcctggctcccagcagggctgtgcctacccgaaagaaggcagcccgccttcccaggccctgcacttccctgacctggctgtggaggctgctctctgggaggagtgggtgctaaggggcttctccacccacccctccttcttgcctacagagggccggtggcctgttcggcaaccacgtcagctactaccaaagcgacggccggagcgccttcccccagaccttcaccactcagcgcccgctgcacatcaacaaggcgggcagcagccagggcgacactgagtcgccatcccacgagaagctggtggactccaccttcaccccgagcagctactcgtccaccggctccaacgccaacatcaacaacgccaacaacaccgccctgggtcgcctccctcgccccgccggctaccccagcacggtcagcactgtggagggccacgggccccccttgtcccctgccatccgggtgcaggaggtggcgtggaagctcagctccaacaggtaagtgggaggctggccaccccaggcggcacacagggcccacgtgctgcaaccctcaggagacagtggaggagacggaggcctcggccagccacttgtccctcaagcttccaggaggttgctgccccagactccagcaagagcaggaggcactatgctgtctcccaagtcctgcccttgatcagacctggcaggctcagggcaagtcagcagtggcctgcggcgctggttctcccacagggccctctcctctcccacacttcctgagtggcagaatgtgatcatcagatgtttgtgttccggcttcacaacagaaaccatcccgtctgcccttccccgagtctctgcccaaacctggcctttctcccagccgagatgggaatggtgtttccattgcttccctggagcccctttgccagcctcccggagagggcatcccctgtgggaggcgccatctgtagcactggcccattctgcccagcacaggatcattcctggaggtcttgactgtacctcttactcctgactcactcttttctccttgtcctctcatccctgtgctctaggatgcactgctgtgacatgctggatggtgggaccttccctcccgccctgggcccccgcagggctcctccctgtctgcatcagcagctccagggttccctggcggggctgagagaggacacaccctgcatcgtgcctggccacgcttcactgtgctgctcttccagagtaggagagtggctcccagcaggctgcacagccccccagcatgccaggttcttgacatgctcgccctccagctcagaaaataatagagaagtagcagcttccctctaaacccctggaaaagtgtccatccaaggagcaggcacacctgccgctggcctgcctgtccctgcagagggcccatttcaagagggctgcatgcaagcccatgggactcaggcatttaattgtgtcagacgacaggccagttaaaaggaccatctccctgtctgctttcctttctgcaaggttggctggtttagccacccagaagcagcactgggggcatccttcaattcatgaggcctgcactgctgccttctgtgtgcacagggcagtgtgctgggcactggattttatgtgccggcctgaagggctggctttgcataggagaggatctaatctaggcatctagtcttgggggcctgcacctgttgtgggggcctcatccttctctgcaacctcactccccttccacggcctttgaggacccaagtactgggtccccatacccccttctcccctctggcctcatgaagcttctgcttaaggagggctccacgtccgtctttagcatctcagggtgaactaattccccaccctctaagggcattttcatgtgaagctttgttctctgtgacataaggggagagggatgtttagaggagctgggggaggagaccccaggggatttccttgtccccacagatatatctctccacatagcaaaatacatgcaaagcacccggcacagtgcccagcacacagtcggtgctcatgaaatgtcggttccctctgcccactgcagatggtacaaacaacacacagggcatcaagcttcagcttggtgaagaggaggagcatagcccacgtcccagctcccttgtccccgtgtcacagctcaaggctaacggcagctctagtgccagcattgcttgtgctgaggatgggccagcacgtcctgtgcccggtggcccccaaaagtgctgctgcctgcctgctgctgctctgcgtctccagctcctccctccgtgcttcaccaaagcccactccacctccctcccctcccagtcctcctggagctcccacctctcatctttccttccactgcggggcgggtggcagtctgcagtcctcctcctcgagagagagaattgcttctaccctgcctgggatgctcagagccagggcactgatttagcactcggctctgagaggatggaccaggatctttctctgatgccctcaggggtctgaggataaagtgggcccagcatgcaaggtctatagaaagcaagacaaagggaggcactgagctgagctcagacaggaaaaggaagaggccttggtccagagctaaagatgacctgaccctgtcccagcagggaaaggcacgttccgatgtgtgaggatctggagctcaggagggattcaggctcagcagggactcaggctcactgccttctgctcaggaaagcaaacccctctaggtgaggcttcctctctgtgcctttaccccagggtgccagtgtcagaatcaagggcaccatcaaaataagaggccaaggacttctcagctatgccaaatgccaaagacccaggtgtcatagctggaggtgagtggggggcagcctctaagttaggcagggcatatgtcattccaatttcatagggaaactgaggcatgaggtggaccaagtgacttggaccagagggtaagtggattggggtcaggactcctggatccacagcagacatccttctcccaaatgggaccctcaccctaatctgaacacttctatggatccatcagcaatcacaggagaacaaagcaccagcaactgtatgcctgttcacgtgtgtgtgcttgtgtttgtgcacgtgtgtacacctgcatgtgtgtgcgtgtgtgatgctttacttgctgaaggaagtggaggaaggttggcagtttctgatgtttttcttcatcttggatattgtaggtgccactcccgggagagccaggcagccatggcgggtcaggaggagacgtctcaggatgagacctatgaagtgaagatgaaccatgacacggaggcctgcagtgagcccagcctgctctccacagagatgtgagctctgctgccctctgctgaggctgacccaagtgtgggaacaaatgtggggaggcagaggcaggtccctgagatccctcctctggggctgattgcaggaggagaggagatcacagagaaaacatctgcaccgcctctttcatctcctcagtgaaatgggagccccccaacacacaacacacacaaacacacacacaccacacacacacacagacacacacaacacacacatacacgatgccctttttagcttggggtttcctcgccaggaaaatttctgaacattgttttataaacattgtaggctgtaagacacagtcataaatatattttctggtgagactcagtatgcacatacatatatagataattaaacaagtgtttcaagacactgcttataatgaagctgcccagaagagggcactggtggcaaagccaggcctgagatttttgtccttgctgccattcttagagtatttttagctgcagttctagatcctttagaaggtggtgacatccatttggtcactaatgactagcccttaaaagcaggtgcagcacagcacaatatcagaaactatcagaatgcgtcaaacgtcacaaaggtaagcgctgtgctgggaaacacttgcttaattgccaacagatgtggctatctgggggtctccttgagaaacatctttatgactctgagtcacatccacagaagtttgagacacagagtgacatccacagaagtttgagacacagtgtttccgaagcttttctggctcttttcaccctcaaagccctgtctcatctgttactgtatacatgactcacaacaggcctctgagacagagagggcatatgtcatttcaattttgtagaaagggaaattgaggcatggggttttccccagggggtaatgcctgggtcccatgggcttgcgtgcagccacttgaaaatgggccctctggagggacaggcaggccagcggcaggtgtgcctgctccttggatggacacttttccaggggtttagagagaagctcccacttctctattattttctgagctggagggcaggcatgtcaagaacctgggatgctggggggctgtgccacctgctgggagccactgtcccactctggaacggcagcacagtgaagcgtggccaggcacgatgcagggtgtgtcctctctcagccccgccagggaaccctggagctgccgatgcagacagggaggagccccacgggggcccagggcgggagggaagccctcaccgacccctcccagcatgtcagtccattcagttcctgaaaggacttcagagtgaggaaggactagccttgcaggcttttgaagacaggaaaggtgtggctggaggtggtgggaggggacaccaggtgccccaccctgaggagtgtggggagaatggcagccaggccagcacagcatgcggcttcctggggtccagtgctttctgctcgggaactggatgggaagagtagcagaagcacctccttttccccagcatagaaagaagaatcgagtgagtaaggaaaagcatggaaagagtcccaaccagcggcacttgacaaatcactcaactgccctgtgccttcgtgtccccatcagcaaaatgggacggtgggggtgacaggccttctacttttctgactcagtgaaacacggtcaatataaaaaagggaaatacctgaagctccttatgagataactgtctctaaattgattcttagagaatacaaacgaatgcctgaccacctaccctagaaatcaggaagagcatatattttaaactatttcggttattctagagtgcttggtgcaccaggcactctgctaggttgttaagaacccagtctccatcctcaaggaaattccacaaactaggaaactaagagggtctcaggagaggaagataacacagagtttctcactacccccagagtggtacaacccccaggggtacaggcgttcagagaaagttgagggcagggtgacctgaactggtaccacgcacaaggtgaaatggaagctggatctgcaagagccagggtgatttgcataagaagaaaatacaatagggaggccttagctagctgagagtaagagctagtcttgaaggtataaatactgcggtctgcactctaccagccttcctgcacatctataaatcatccaagtctctgtgctgtaccatgagcaggcatggagtcaccctcagaggtgtggggtggcaccagggaccagtgagtcagtggtctcatctgggaatgaggttggaatgcagctgtgcttcttgaactgcaggctgacccagcagagattgtgaatcaaaattttaataaaaatagaacagactaaagtggactgggactcaccagggtgcaacgcatgcaccgagggtaaccaaaggctatgaggtttcattccatcaggtgtgtctgtgcatgatgagaagctgtcaaatctacttctcatcgagtttccatcaaaggcctggaagccatagactagatgccccatgaggtccctcacagccctgctgttcacctactgagtgaccgtagagtggttgtaggcagctgcttatgtgctcttgctgatgagggggtggcagggcgggagaaatcgggggacgggcataagtttgggtgaaagttgagggtcactggggaaaacagcatcagctcatgcaaacacgggagccaaggccattccccaaaagaacttcatgggcctaggattctttccgctttctcaacacctttgaccccagagtgccttcactgccccaagtcagaactgcaggcttatgagacaggctgcgggtgaggagctggccattcccactgagcaggcctggaagacgtcaggggcaggccagaacttcttggggtggcaattccccaaacctgcatgtaagcacaaagtgtgcgtcccttcactaaggatcagagcaaagtgctttccgggggtgcagctgtccctgtgggtggccacttctcagcctccaggaacaagccccatgagctctctgttccaggctctcctaccaggatgacgaaaatcggcaactgacgctcccagaggaggacaagagggacatccggcaatctccgaagaggggtttcctccgctctgcctcactaggtaaatgcaccgctcgctctctggatgtggtcggcggttactccctagagaacactggtcagggatgattgggaaatcgttgtggcctgcctcaaatcagccccacacagtggggcatttccaaagcaaggagacaacattccaaaggcagggtgtgcagggatgagccctggacaccagaatacgtctcagacgaggggaggggaaaggaggagcgtctcgggccatagttactgctcctggcaccccaccagggtgtaaactgtcacaggccagtgccctgttttcctgccctgatggtggctctctggctggctttgcaggtcgaagggcctccttccacctggaatgtctgaagcgacagaaggaccgagggggagacatctctcagaagacagtcctgcccttgcatctggttcatcatcaggtagctcacacttttggacaggccactgtcacctgccagcaggccagacagtccccagggtgacggacaaatcctgaagacttcagtgggtcttgcctgtctcagatggctggcacgtcctgcccctgccctaagagccatccctgtagggcttcacactcctgtgcaggtgagggccacggcaaggtctgcagcatcgcaggtgggggcctaggaagtgctggtgcacaggagctctttgtgtgatcctgaggacccacagctgcaggttccacctgagctttcttcttaggctgccacagatgccactgacgcctctgacactggcctatgcctcagggcactcaggaagatgtacttgtacctagagtttgaatatacctggaaattttgccacacaaaaatccatccagtgacataaagaagtgattaaagaacccaccagcaacatggtcaagagtagggaatgacatccgtgggaagcaggtccagggagattccataaatgaaatgtctcttggcatggctgactccagctgagacagtgaaatccaagatgccaggaccaaacatgccttagtatctttgaacttcagtgttatctaaggccagtctattaaccccaggcaaactgaggtctaaacctgggtttcccaacattctgaccttattaaagttatactcttttatagcatggacctatgttttaaatagacctatgctttgtacccaaaggcattcaactgccaatcaaaagtcataatcagcatgagatggccagtgtggcctggctgagttgatagtacttcagctccaaaaaataaacaggttttcttagcctgtgtggtgttgtcttccactgggctttctgaaataatgaatatggccttacacttttctcagattcccagggacccaggagccccaggctgaggaccaccatgggcaggggcaggaggtggaaggatgtggggacactgtgtgtgctatcttaaaagatttctagaagtcgatttcacctatctgttcttgtcgtactggtaggcacgaaactctcctcttcatctctttctcctcctgtactctgtgaccctagaggtggtctttccccaccacagtgtcgctctctcccgggagcacatcccatcagagcagctcaccctgcagagcctctgccctggcaggttgtcatggcaacagccagacaggcctggtccctaccctcaggatgctcaagaatattcagggacagagggcgtaccgtgtgacttttttttttttttttttgagacagagttttgctcttgttgcccaggctggagtgcaatggcacgatctcggctcaccacaacctccacctcccgggttcaagtgattctcctgcctcagcctcccaagtagctgggattacaggcatgcaccaccatgcctggctaattttgcatttgtagtagagactgggttactccgtgttggtcaggctggtcttgaactcccgacctcaggtgatctgcccgccttggcctcccaaagtcctgggattacaggcatgagccactgctcccagccctgaatcttttaatcacaatacagcaccggatttaacaatggctcaaagacaacctgagctagagactggcagggcattatgaatggccccattaactgtgagaactaaaaccacaaatactggttttcccaactctttgtgaggtgcacagcgcttcttcacagacctcattgcgcttgagcctcacaccagccccacagggcagatggatagacagcattcgttttctggctttacagacatgcaggcctcaccctgctctccattctattgaggacaaaaccaagagcgagagaatgcacagctgacaggtgaccaggccagggctaaaagcaggttaccacgacttcacccaatcccagctttcagaagttacaggagaaagagatcacttcagacccagatgatcctaagatgtattttgagatagttgaaagtcatgccaggttgagataggaccgacaggggaaaataatggcatgggaataccaggcaggtggagctagctggacacagcagctgcaaagcagtgcttgctcagaagcaggggcctgccttgtttggggtcggccactcctattaactcacactccttgtgtgtccgcaggcattggcagtggcaggcctgagccccctcctccagagaagccattcccctgcctcattccctaggccttttgccaccccaccagccacacctggcagccgaggctggcccccacagcccgtccccaccctgcggcttgagggggtcgagtccagtgagaaactcaacagcagcttcccatccatccactgcggctcctgggctgagaccacccccggtggcgggggcagcagcgccgcccggagagtccggcccgtctccctcatggtgcccagccaggctggggccccagggaggcagttccacggcagtgccagcagcctggtggaagcggtaggtgactcgcagatgggcaggggggagaggccacgggcaacaaggggacttggcatgcggggctgagaagggagcacctggctcttgccaaattcattgcagtcaatatctgagcccgaaagaccctccctctcagggctgcaggagggctcgtgtgcggaaagccatgactgcacaagatgctatgggctctcttgaggctgggcccactgcagagggcggcagaaaccactgagcaacttatcccttatactgcagctgctcgacatgcaaatgtgagcctggctgcctttatacacagacaggcaagatccaaggtgctcaggcctgactgcccgtgagcatcacctggggagctttggaaacccgggacagattaactgatgattgttaaagctcttcgatgattttaacgtgtagcaaggttgagagccactagcctagaacaagcgagctttcagtcccactgtgctctgcctggtcagagcatctagtgcaatcccggcaccacattattagggacctttgacacactggaacaaacccaacagaggatgaccaggatggcaaggttcctagaaaccatttcctaggagaaccgtttcagggaattcgggaagaaaacctggagaggaggtgactttggagggtgcgatacacctctcacacctgcaacgggtgggatggggaaagggtggcaggctcagcccaccagcggacagatttcagctcacatggggaagaccttcccaaatgagctcttccaagatgagaggggcttgcctgaaaggtagtgagccccccatcatcagacatagccaagcagagactgtgctcatccgggcgtcaggctgtggtgcaggaggtggggcgttaaaccaggtggcttccaaggtttacctctcaaagtctggtattcctgtggcctcgatcatcctgcattcatttcacagaccttccctgagcgcctaccatgtgcaggccctgttctaggtacagggacacagctgagaaacagagcttctgctctcatgagctcacatcatggtgaggagagacagataataaacacatacatatataacacatcaggaaggtcaggagtgccaaagaaaaactaagcagggcaaggagagaatgagtggcgtgggcaaggagcaagacaaacagatgcctgaaaggagcgagtgccaggctgcactcagcttcccccgacccgctggctcaggagccgattttcccatagccaggcactaagcagccggtagggaggacagagaagcttaagggtcacctgctggcccttcccagcagaagcaaggcaggggcatgcgccgtgtttgcacagatacctcacccctggaaaggcagcagcaggcaatgggcagtgggcctgtctcagcagtttcaccagggagaatggtttctctgaaagaatagtataaaggttcagtgggtgtcagaaaggagagaggcaggctgggatctgctgatacagcatcagggcaaccccccggcccctctgagagccaaaccttctctggtttttgttttggttgttttttgagacagggtctcgctctgtcacccaggctggagtgtagtggtacaatcacagctcagtgcagcctggcgctgctggggtcaaatgatcctcccacctcagtctctggccttgctaagatcacaggtgtgcatcaccacacccagctaattattcttaaattttttgtagagacgaagtttccctgtgttgcctgggcctggtctcgaactcctgggctcaagcagtccttctgcctgggcttcccaaagtgctgggtgacaggtgtgagccaccgtgctgggccataagcaagtcttcatatatttgatgacagtgtttgaccaccccagccaaaacttctctggcctgcacatccctaattctggcagatgctccatctccacttgttccccatgggtgcccctcccaacacacacacgtacacgtgcacacacgcacacttccccaagtgacctaccagataccccctcgctctagccctcaagggaagagctgggctccaggagtaatgttcctttggttcttcatggctcccaccccgctccttcaggtcttgatttcagaaggactggggcagtttgctcaagatcccaagttcatcgaggtcaccacccaggagctggccgacgcctgcgacatgaccatagaggagatggagagcgcggccgacaacatcctcagcgggggcgccccacagagccccaatggcgccctcttaccctttgtgaactgcagggacgcggggcaggaccgagccgggggcgaagaggacgcgggctgtgtgcgcgcgcggggtcgaccgagtgaggaggagctccaggacagcagggtctacgtcagcagcctgtagtgggcgctgccagatgcgggcttttttttatttgtttcaatgttcctaatgggttcgtttcagaagtgcctcactgttctcgtgacctggagttaaccggaacagcgtcttcattcatttctgttgggaccagacgcggagcctgggtgcgcgagccgccctccgggaggaaggcgcccggctgcgtctgcagaggcggggagaggaggcggcgagggtcccggggcgcgaggaaggcgcctgccctctcccagctcgcaggccccgggcccggccgcgcctccgcggggagagcaccccggcttcccgcgcgccctcaccaaaaggaccctacagcaaacgggtgtctttcgactctgcttgtagaaaccatttgcacatattctgtacgagcctcgctgtctccctagagccagggccctgcggatttggagaagggagcggggcaggacttccaggaggaccccaacccggcccggagagggaggaggaggcctccaggggcgcggagctctggggatgggcgtcgggccggcagtggtgcggctcactccgtccctgcccacctgcgacgggatcccccgaccggcacgggccacgccgagctcccggccagccgccggcccgcaggcagcgcgagggaggagctgcgccgccggctccgcccaaccaggtggtgctgagcttccgctgagcgctcttttgttttgtggtttgacacttttcttgacagcatgttgcagtttcttttcggttttggttttttttaaatgttttattttgctttcccagcgggaggggaggaagaagagtgtttacaaagtcctgtagccccctcacctttctgttttcacttttgccaatgtacatcgggtttggttttcttgtattatttaaacggttgtggtttcctttttccacggaggttcaatagaagccgctgcaggagagttttaccaaccattgtgtatgcccaataatttgttatcatttccttaggtagtaacctatttttgttctggtttggttcggttatctaatggaaaggtaactggcaatgcacttgatgtggtcttgcacatgtgggtgatagagttgggttcctttttatgctgggtgtacaggtgggtttgggagagaggagcatgcgcgagagagtctccgagtgtgtgcgacgcgtgtgtgtgtggtgggttgtctgtgtgcatatgtcctgcccgtgtatatgcacccacaccatgtgcccgtgcacaccagtgactacgcagtcccccctttctggtttagctgtgggaagatctgaatctggggccgtttgaaagcaaaaacaaaccactgtctctgcttctgaaacgggaatcagtaactctttgcattttctgtcccacaagatatgcaaaaacaatgcaataatattcatttaaaaatacaattgtgagttgtgttggcattaaaactgtattttaaaaaaagacagaaatttaagggaaaaacacaagaaggcattttgcttcaatatattccgtgtaatgttttattgcattgataatgtttctgttgaagaaaccgttatacttgaattcaggtcagtttcagtatttttcaaatatttttttaaaactgaattgcaattgtgccaagcgaatataatgaattgaattaagttggttttcggattcacttcttgtatattttgctgcatgtaaagtaaatcattttgtatttggagtgtgacaagctttacctttgaactcaagtgcttttctatatgtggttgggggaaagggaacaagttttctttagtttgcacaatgagcaaaggtatcaccagtgtagtcattattctgctctccacaaacaggtttggacattactgttttgcatatcttgtgtttgcttacatttccctcaatttttccaaaatcgtttgctgggtatgtttgtaccgcctcttgctgtgagagaccaggacctattttattccagtcttcactctgtccactctgctctggtcatctgatttggtacttctccaagaacagcccttcactgtgaggtgcagggaggcgttctgatgagccctcagtcactgggccgtcatccgcatcccccatggaagaggtagctggctttcccttcccttccaccacacggaattttctctttggcttccttaggaaagtgtacactaaccgggaggataaaattaaagtcaggctgcttggagggaggggcatcctcacttccggattcttgttgctctacccaacaaggacagcaggggctcgagaaaggaactggtgaaaccctgatccatctgaaagtcaactctgcgtgctcctttctccatcccttcctcactctggagcagcctttccttcaggcttgccctaatgtttgggctgccggggagggggccaggacaagggaagaggcatccggagctcacagtgggggtgggaacagatttttgtgggggcatctctaatgctcacttatatctccctagaacatcactcttttggtgctgtgtccttcaaatgtatgtcaacagtggtggctgaaaagggactgctttggggaaaacaggacccaaccattcacccagaattgacccattaaatctcttccagtcctagtgttccctgagcccctcttggcacatatataagtaagctagaaattacaataagggacagtccattcctctatgacagcttgctggactgattcatgacaaagtggagaaatgtactcaatactccccggttaacacagtctagaaacagagtttctttatggatatccacacccaagtcatccaaactttcttgattccttttcactgccatcaaggtcctctagaaattgagtttaggtatcatcctttgaaaagttcccaagatttctaccaggaggtacacacaggcgttccctgtctagggcaggaggactatcctagcttgaccttctgatccactagaataagactggcgtatgatgcctgtcatcagaacagactggcacaagtagtgacatcaatgaaccacagcacaatcttccaagtgatgtctactctccacctaaaatggaattttccccatgaccttgtaaaacataattgtcacatcttccatacccctcctgacagcccccaagtgtcaggagaaaacagtcaggggctaagggcccaagggacttgaagaaacaacagtttaaggtctgcagtttggtcaacttaattcttgtcctccgaccagccctgcctctttcatttccagaccttggagaatttttcccagctttgattcagaaggtactagttataacccctttccttcttcttaatccaataggcctcactctcactgggaaatccactcaaaggaacaaggcaatgtctctcattctatttcccagttccaaattccaggtgcttgtctggagtgaagctacccgttactttctcccagcttttctccacccagcatgtctcctgcccatgcagctgaagacagtggggcaacctcaggagaagcagacctttccatgcccaagttcatctcctgagcaacagtgacacctagaaaatgaggactttggaagtcacccaaaagatggtggctactttatggagtcctgaagatacacagccaccactcctaaaggcaaagaaagaaaacacgaatgtaggtcagggatagagtggaaccctggtcatcggggtttttagcctcatcgtgggaaaggtggtaaaggaggatgatggcatctccatccctagaggccaagaattgaaatatcattgtcaaggattagaaacaattcagcaaagaggccacaaaaagggcctgctgactcccagaagacctctttaaaccccaggggaggcaaatacttgctgatggagtctgggccgtttccatattttaaagaagacctgcctctggggcaaatgtcagcacagagaggactgggaggagaatggaggcaagaaaagggcatattttgactccctctgtgcctcttcccagttcatggaaggatgtgttcagcttacccacccacagtgaccagtgtggtggagccgctgacatctcaaggatctatttgggaaggtgagaagagtactcattccatctgggggtgttgttccagccacatcagcctacctggtgggatgtgggggtgtctgccaccctgtcccccctctgctgatgtccctcccctcaggctgtccaggtgccacctgacacaggctgctgtgcaaagacaggcggggaagcccaaacctcactcccagggaggccctcagccgccagagtccaggttctccagaggctacgatttgaggaggttgagggggaagacaggagggaaagaaaagtcctacaactgtcaggaatggggcacctttccctgtccctaagcaaagctccctcttcccactgccctccccagccccagctccctgtcctccccaacacctagtgagaaagacggtgcgtggaagggagtcccatgggcagatgcttacacgacctctttgtgaagcctcttctgggtttaacttcattcatcaatttattcttatgtcaaagcaatgaaacttttctttctggagccagataccaatacaacaggtgaacgggtttctgccacatctctacattgacgggggatgcttgaacaacccccctcactacacagacacacaccgttaaggcacaagggctggggttgagctctagatgagggactttcctgctcctgcaagggtgagcactgtatacacagacaaggagggtgcagtagagtgactcccttggatggaagtagtaccatcagaacctactattattatgacataaattctatttacatacattgagagaatactacaatcaacactttttcctgggatgactttaagaggtttgagccacagcacctgaagtggcaaagatccatggtctttgtagggtattagagaactcttccagtcacctctgaaagcactctagatcttgcagctgagtggatgaagtgtaacaaatctgttgcacgctgagaggagtcagaattagcatttttcatgaaagttccccacgtctctactaagaatgaggaagaaaagactaagactaggtaattacacagaggcttgaaatgttacatcaccagagccaagtcctctcccttcagatcagttactggctgctacacagggacacccccaccttttcagggcatcccatgcactccacttctcaggatctaaggaatttgactttgtagggatcccagaaagggcactgtgccacttcccctggtgtgaatcagacatacattgtacattcatttctaaaattcactcatgcacctcaaaccaaggtcattatccaaaaaaaaaaaaaaaaagctctgggtggaagagtttgtaagttttaagagagggtcatttctatgtgaggaaatgcagaaatggacagaatgattcttattcactgtttgggtctggagaattcccattgtggaaatcttagagatctcaagtttattaccaagggaataaggaaaaaaaggtgagcaggcaccaggccaagcagtggctcccttgccaaggaacctgaggctgcaggtttcagggacccccttgaagaaacctctcctggccattggccaggagaaaagagaagtctctcctgtagagtcacaagagaagcaaaagagggtgggtcactgggtcctggacatagcccccaaccccaagacttcccaatatggagaaactacaccaatgtttaaaaggggaaaaggaaagaacttgtacatcaagggaagatgatttgtaaacacacagtcctgtgcagaaagatccccttcaggaggtgtctccagcatcccaaagctgtgcgcaccttctcttttcctgcctcaggccacctatgcatccagctgcagcccatacccacacctgaaatccatctcttgaatcccagccaggttatataccaccccattgccatgtcctgtcctggccagaatgcatgctgttcccccaagcctcgtgggagtgaggccatgggaaacagagatgagcatgtctggacaagtctgtgatggtagtggatgagaataacccatggcaaaacacgcacattcattaagaaatagggcgacagattccccgttggtgaagcactgaaaggtctattactctcataatattgctgttttattttaatccaccagagctaccatgcaaaactttcctcctgtgaaacgctccagataaagctcctctaatctccccttccctcatgtcctccagctcaaacccaccttcatcccccaaaccaatctgtatcatgcctgttatcagagaggcacagaaagatgggcagtgcctccgttgtcaccattccccacacccctacacacccccacaccctcccctccaggctccacgacttcacagtcttactgttgtaaatatcattgtacagtttgtaatcctcaaataatcccattgtcagaggcctcgcctgatgggccttctcaccctcgagaaaggccagggaatctagaaggggcaacccttcaaggagagcttcagggtcatctctgtgtgagacactattgtatattcctgtaagattgcatttttatctaaggaatgatgttatttaaaaaacaaacaaaaaacacaaaaaataagaattgcaaataaatttcttaacaatgtctacattgacttcattgtatcttccctcttccttatttcttcctttctcctgtttcctagaggtcacaaatacaaacttcactcagttatctcaactgtctgggatccccaaaaggaagaagactggagagaacacaggaaatatgaatccaatgataatacctaagtccattcagcagttaacccatcccctatttcttccttctcatgaaagagttgacagaaaaatggccaaaagttaaaaaggagacaaaatcagaggaattaaatggctaattcacatggattagacaggaaaagcagtctctgaaattggttttgaaaggacagaagggaagagggatggaatgtaggagagaagaaaggagggggagatatgataatatataaagtactatgaggactatacaaatgtaagattgcttttctttttttttgttattataacttaatctgatttcgataaacctttcagaataaccccttaagtaaaaataatttgtcccagaggattctgggaagatggcagagtaaggagcaccaagaatcctccccgatagacaacaaatacactggcagaatctgttttgtttaactattaatattttgaaactctggagtctaatgaaggtttgcaactttcagggggaggcttggacagtaaatcaaggttgattttggtcaatttcagctcttagtacagtagcagctaacccactctcctcccctagcccactttctactcctggaagggtgagcactgcatagacaggcatgaagagataaccagtgtgacttccttgggtggaaatagtaccagcagaacctattattattatgagaaagtactatttatctcataatacaggcagctgagcacttgtccaatagcaccttgcacacagcgtgtagaggccagagtgggctaaaaatatcctgttcttcaaatttcagggatctttgttcaggatacttattgctgcttctaatcacagaggtgcaaacacagaggtgggcagctacttttgttgcacctctccccactgctgcaagcccctccaccactagctgaagtgattccagataatttgaagaaccagcacccttcttcccccttcacttttctctttttccttctttgggagacagacattaaagactaagacactcaaaagcaactgcatatacaaggaaaattagaaagtgactgcacataccctgggaaagaaacaggctcagaaaacacctaagaagacctgaagtttacacctcatgccgatgcttgagtggcctaaaaaagacaaaaacaccaccaccaaaccctaaggaaggaggaaactctgattttcagggttatcacattcttagattcaaatgtccagttttcaacaaaaagtcacaaggcaaagaaagaaacaggaaagtgtggcccattcgaaggaaaaataaataaattaacaggaactgctcctagaaaagacctgatggcagatctactcgac

SEQ ID NO: 74 - DNA, 320416 bp, Homo sapiens
  source 1..320416: mol_type = genomic DNA
caaaagcaaataaatcgaatcctgtgaagtaacaaagcagacgcccttctcctaacaggcagcacaaagctaaatgaaaaatatcagtcatccactagataaagtattttcccctttagacaggagctgccgtttgcaaatctcccccaccctaaatccaagccagcgaaggtatcaaaaaataaactactcccttcagctcccagactggaggcaacagtttcagcagcaccgtctatttccttgaacaacacgagcggtttgaaagaccttggctttgacttccctgtacctgcctccaaacacacgtgggggcggggtggggtggggggagatattgccccccatccccgttgccttccgcgacgccaggccaggcgcagggcaggggagaagatggggggcgccctggattcgcggttccagctgcaggcagttacctggggtagtgagtgctctctacagacccgggctaccccaacccccccgattccagaaagggccggagaaaagcagggggcgcctgccccgctccggagcagccagggagcccggccgagccttgacgaggatgagctcggagaccgcagcagctaccgcccgctagcacctgagctcccagggggcggggcctcctccaggtgtgcgcagaggaggccggcgcggagtcggggccggcgcgggagcccgagctgtcccccagcccagaaatgcgcggggaggagcggttcatccgcaccccagcgccgcgggagacactggcgccgcctgcctcctccgggtcccggggggagagcgcaccgtgcggcgcggagggggttaaccgggcagcccgccgctggagcgcgcttaaccctttggagcccgcaggtcagccgggccaggctggggtggcggcaccccgagtcccacgcgacggccaccccgagcgcgcaagtggtgccgggcagaaccgcgcgccgggctgcagacccgccggggcgcggcgcggcgcgggccgtgggcggctcggggcgggcggagggcgggggacggcggcgggcgcgcagcgtcgccagggcgaagccggcgtgcggcgcggcgcggcgggcgcggagcgagcgggcgggcgagcgcctccgtccccggatgtgagctccggctgcccgcggtcccgagccagcggcggcgcgggcggcggcggcgggcaccgggcaccgcggcgggcgggcagacgggcgggcatggggggagcgccgagcggccccggcggccgggccggcatcaccgcggcgtctctccgctagaggaggggacaagccagttctcctttgcagcaaaaaattacatgtatatattattaagataatatatacattggattttatttttttaaaaagtttattttgctccatttttgaaaaagagagagcttgggtggcgagcggttttttttttaaatcaattatccttattttctgttatttgtccccgtccctccccacccccctgctgaagcgagaataagggcagggaccgcggctcctacctcttggtgatccccttccccattccgcccccgcctcaacgcccagcacagtgccctgcacacagtagtcgctcaataaatgttcgtggatgatgatgatgatgatgatgaaaaaaatgcagcatcaacggcagcagcaagcggaccacgcgaacggtgagcagccagagcccgggcacccgctgccaaatccgatcctgtcatggtcctccagccccctcccccttccccgcggcgctggatgggttgagggggttggagagggtgctgccagctcggtgtcgtctacacagagaggggacatgcgtgacagccactccgcgctcccctccaggccctgaatgtcagagttaattctgcatttgtggggtgggggcggccgtggagtgtgtggagcgcggtgcagccggaggggcggcgagtcggggtgattcgggttcagtgtcctcgggctcaactttccttcaacgcccccgagcgatggcaggagggccgcaagtcttcagccggagcccccttgccagcctcttctcgccttccactcctcccccgccccctcgttgactaggaagaaggtccctggtggcatccggaaaattctaggattgcccggtttcgccctccgcgccggtgggtgaagcacacccatcccctcgcgggggaggcccggcctcggtatcggggaaaggggttcgggtggagcgtgcgttcccgctcccgtcgccggctgtgcacacgtcggtaacctagcaatgcccggggagccgctgccgctgtggggctcccctccccagctctggcccgggcaccacgtgcagcttccacgccggccggggctgggtcgagggaggatggagcagctcctggccagccctcccctttggagaccgccagtgccccccaacccctgtcggctggaagcctttccgggtgagcgctcccctagggagaagcttgacatgactcgactcgtccccgctccgattgcccgccgctcgcccgctttgccctcttctcaggctttcagacccgtgcttgctttgactctttacttagcaataattggctttgcaaacgcccatctctctaccttgctgtcacctctctcacttctgcttcagtgaggagactgtggcggaaggcggcaggtgcctgggagatctgcctgggagatggcctgacccaaagctggcgggggcttcgcatagggagcctccttgagtttctgccttgtgtgcacctggataccaacctacacggagataattccctcttaggcctggaggcccctggcataatccagtcagtctatcctaggtgtaggggtgcaggctgactgccttgtctgtctctctggatgctggcttggctgatgctgctgcaatttaaaatgcaaaaaagccctaaagatgttttctgttttcggaagcctgtggaggaaatgagtcccaagcatcatgaattttcatttgcaggaagtgtcagtgcataatctagatatttgttatggggtttttggtattgcctgggtgcctatggaagattttttttcggtactgaaaaaaatgcatttgtggctgtggaaagatgttggagtaacactctgaaaatgattaagactattgaattattggtactgcctttttttttccccttggtgatggtggtagttatgttagagaaaagctgttgtatgtatctgttactcattagagatagatgggttttacaaatcagagatgcggagtaaatgtgggaatgacctcagttttgtcagaagaaatgcactaaaagaccctttgtgaagacatgatgtgaaggagtactaaccccactgggtgtgatgcagcggtgatcctgtgtgattgacactgagaccagagctcgtggacttttcttgactctccagctgactaaagcccagcttgtgaaaaatagcacatgagattcaaaatggaaacataggagtgaatgattcccctgttattgatgggagacaacctttgatttttttctcctacccactggatcctcatttaaaaaaaaaaatctttgtttttctccttctccccagaggcaaactatgcaagaggcaccagacttcctctttctggtgaaggaccaacttctcagccgaatagctccaagcaaactgtcctgtcttggcaagctgcaatcgatgctgctagacaggccaaggctgcccaaactatgagcacctctgcacccccacctgtaggatctctctcccaaagaaaacgtcagcaatacgccaagagcaaaaaacagggtaactcgtccaacagccgacctgcccgcgcccttttctgtttatcactcaataaccccatccgaagagcctgcattagtatagtggaatggaagtatcctttttttgggggaagtctttctcattttctcttttaccatctgttttttaaaaggatttgctttctgaagtgacacaaagctgtagcagtctggaatgcgagtaacagaagttgtatataaggggtttcattgtatataccttcctgtctcttcgggttgcagaggggtggctgtacgggtatatttagcccactgtctggatgtgtgtatagtagtagtagtagggggagggagtgacagcctgaaacttcacaggggcagataattaaaatgtgaaaccaacctttggttattggacattagatggttagttttaaattcagtgttgtctttgggcaatagcatgcattgaacctattgcaaacaaggtatacagattagaaaaaaagactgtataagactctgtttgaagggaatacatttttgacctttagtagaatcttctcattctgatgtttgaaatttgcttctgcaactacaattaatgctaaggttgcttctagtctgacatttggtgattctaattattcaggtagctgcagatatgagcacatgcttcctagggagagattacttttgattttttttctctgatcagtgctataacttcctggaatttccttttgacaagttccaaagaagcatttggaacgtgagcatgagggagccagtgaagggagaggctcgtgtgtgcctcttcctcctgggcccttatgagttatagaacagccttttcagtggaggaatttgcagttgctgcctttataaaaaattctgtctatgtccttggactggaggtacatttctgggtgtctcctttgtatttttaaaattgaactccaaatgccccagaatggctgtcatgtcccagatcttggaaaacgattgtgcttcagcctgcttaaccccttccctaaatctggaggccaacctccagttactgccactcttcagagaaggttgactgaggccttctttctgagcaaatggctttttaattaggcagatgattcattggtctgggtaaagtaaagcatttcctttccccagaagtgtgtttggaactgtcaggggccttagaacagttcctaactataggaaggggtgtgaatgtaggaattccctccaccaggcccagaaggatggaggggccacaccaaaaagggaggatgttggcagccagctagaaagtggagctgaaatccccttataatttgaggatctagctcggcagctatttgcatgccctctgtctttagctggctattttctgtgctaatggacaggagttaaaatgaggtaactgtctagaaagattttggagagagcagccaaatgctagggtaggatttgaggggttctcatgtgctttttcattttgcagcagatgtcccttctctagagtgagttatggtgtctctcacatagctggggttgtgtgtgtgcattttcttttgaagttctctagtctgagaacgaggagggagctcggtaagccagcatgtggcccagtggcattgctagattcatgacaatggctgtaccttgccaggaagacctcagactggcttgacacgactctgagtaagcagagacctctttgtggggtcactacttttgtgtggagtaggtgggaggcctgatgctgtttctctttgtgcacggtaatgtgtacatagcaatttttgcatgcagagtgaattcctggatcacgctgctgtctcccttttccagttgccagacacatgtgtacaggaattaggggacgtggctgccaattcagggagaagcctgtttacaaatgggacagtttgtaaaatagatagacccttaagcaatatatgatttttttttctctttttttaatgacagtttccttctaattcagggagcaggctatagaaatcctttccaccccgggcagctctgtcaaggccccatccgcagtgggagagcaagggtcaagggtcatttgtttttacagacaggcatgacagagtgtcctgccccctggaggagtgagggatgttctccttatcagaaggaattgttaggatcagacccatctatttctctattgctctgttctgcttcacttgtgaaaatcttatggcagtgagatggtatccacttgtacctggagaccaaaactggaccaacataaagaaaaaaaaatacaacttatatttagtcttcctgaacagtgttagtatttctcagatgtgctggtttatcatttaggtattgggaaattgaaaaggaagaatacctattacttaggtattgggaaattgaaaatgaagaatggaagaaagagggagggaagagactattgtgtttctatggagaacaacattggggcccttgactttagatttcagtggggacctacaaaaaggaaaaatggaaagggaattctgaagtcttaaggtgggctatctgaaagttggatccctgggtgaaaaagattttataatattagatgagttgagagaaccaatgtgaattaaagctgactggcttaaaaaaaataaacccatcaaaattagtaagggaataatgttattcattgcctttttttcgttgagttatgaaagctcttcgaagatgaaggttttatgaaactcaagatctctccagaggccgggcacagtggctcacgcctgtaattccagcactttgggaggctgaggtgagcagattgcgagtccagaagtgagcagattgcttgagtccaggagttcaagaccagcctgggcaacatggcaaaacccctgtctctactaaaaaaaaaaaaaaaaaaaaaaaaaaaaattagccggcgtggtggcacatgactgtagttccagctacctgggagactgaggtgggaggatggctggcttgagcctgggaggcggaggttgcagcaagttgagattgcgccagtgcactccagccttggtgacagtgagaccccatctcaaaaaaaaaaaaaaaaaatgatatctctagagaggtaaagagtatttgtttcctgtggcatttttggatttcccagaagtatgtcaggatgaatggagaatagtctgttcgtatgctccagttttaagtaccttgaagtgtttagttaaaccatggccttgcctcttgtgggtgagtgtataggcgaagcactgtggtaaaatcaagcccaggaattgcagatgaggctggtgctcacaaaaccttgtatttggaaaggctgaaaacccaaagaagaaaaacaatcattttggcagatgtcaaattttgtgttgccagttttgacaatgtctcttaataacaccagaatgtttaggtaagtatctcttgaaggctgatctcaaagtgattcttccagacagaccaccaagattgagaaatgttaaagcctactttgaacgtgtctggtgctgatttcttatggctttttaatttaatttgtttacaaattgagcacagtaacagcatattataaactgagctccagtccggctctaatctgaaacagttatagccatcgattcctctagcagagaaagcagaggcgggagctgaagcctggctcgctgctgatcacatctgaggtattggaatatgccatgagaaagttataggtagaatgagaaggtcctggtggcttggcctggcccagtccagacaggcgatttaggctgaccctgccaagaatagcccctgagaaaatggctctaacacatggaggcaaggatctgcggaagacatttatcccatgatgatttctctgtgtctaccacagccgggaacttagtaaggctcttgtcacttttaaacctgtaagaagcagaaacctagttcacacagtgccctaattggatgtacttttaggttttaatatgcagtgtgcagccgaagaatgagtgtaacatgatccttgcaacagaagaaaaggacacggagaggtcatttggtaggaggctccactgtgagatgaccaccgatgattacttctgccgaaaacctagcagtcacagcagtcagccgaaataggatttgtgtatgtcattttccttttaaaagtgctttgaaagtggtgtgatcgggagtgtgatgagggacatggtttatgtttccataacacatatataccttaacacattttttcagaccatttgacatatttatattattggctatttttgccaattgtgtggccttagctatttacatcccattccctgaagatgattctaattcaacaaatcataacttggtaagtgtccttagagttcctgctggtcctggtatatggttatcatttgcttctatacttaaactggcagctggccttctgggtggttgaagtttatagctatgcatgtcgtgtttcttggagctttgcaacagtggttttttgtttgtttgtttgttttaacctgtattctcaaatttatactgactgaaagtatttaaagtcatgaatcttttataaatagatatggaatttttatggaagagatttggagcagattttaaaataactgttatctccacataagtttttgctaccattcttttcctgataatattagcttttttcttttctttttttttttttgtttttaatctagtgttcttgggagtggtgggtactttggtcagttgttctggtaagtagagaattatcgtagactttgtacatgaactatttttagagaagtagaatataacaaaactaataaatctacatagagcataatttggagaataatacatgatattattgaatacatgatataatattaaagtttctactccacgtcctatgaaatgctccaagagaaaatgattgtatggttaaataaatcaggatgcttccatatactttgctgccttcttaaagatttatagtgcacattagcttagtaaaagctttgggaagttctgcagttaaaaaacaggtttccttttatttaactcagctagtccctaaaagtaatcagtcatgaattctttaaacattttttttttttttggcaaaagactttaacatcatggaaccagtggtccatggaacttcctttgggaaaggttgatatagttttttttttaaaaaaaaagcactaaagagtactagactgggactaggatcttgtcccactcacctgtcaactagctgtatttggggtcatttctcatacctttctgcattgctgtgcagccacctggcaattaggaggattgggtaagaagattgctagtatcgtttttacctctgacattctgcaatctttctttgatgattcagaagccatttcaggatttttctggtgctgcagcatccttcttgcaaggattggttctttgcaatcagaagccatgcagaatgggagatgaaggggagcccattctggataacaggaaactctattgtttttcttctcttctcttagctggttccgtttgtttttggcttctcatgttgaagctctattttagcagggctggatgttcctaactgagcgagcgttgtaaaggcaaacacactaggctctcccttgtgtgggagagctctgctggcttctgaagatagtgaaattatgctcttgtgaataagccttaacgatttatgtacaggatttcatgttacatttaaaatgttgtggcacatttcagatgtaatgtgatgtctatttgtatgtgggctttagtagtttgatatctagagaattttctaaaaattttgggaattgatgctgaaaatacaactataaatgggagtcggataaccacataaacactggtagtatatatttggacaatgccagagatcatttgtgtaactttggacattttatgtagcttttgatttctttgtagacatgtgacattagatgattgttttaaagaaaaagcagaagtggtggaaagcctcccatcaatggagatagatcatcgtagtctaggccacagatggtgttagccttgttaccaaatttaacgacgtggatggtgacccagattgttacttttcgtagctcaagagaacatgattaaacaaacttagaaaataaatacctttcagaaaggcagattaattcagatcagtggaataattaatgtagctgcatgtgtaagccaattaatattctgaatttttcccagggaaattcagggcactgatataggcactgtcagaccatttggatttctcagctaagaagtcaggaaataaaatacaggaaatggattaatctttcccttttgcaccccttctccagtgaatcttttcttgactattcttaagctttgaacttttttttttttttgtggggggggatttggcagtgtgttaatttggtgggcctttctaaaagccaacgtatattcctttgacctcttcatatagtattctgaaactcatggcattcaactttgtgtcttgctttcacttgggtggtcacatggccagatgaatttttactctgcttgactctttaaatacttcctttcccactgtgggaagggaagatctttgtggatttccttctgactctaagcaaggtcccatgccatgttggtcctcccatgagggagctggttttttgtttttttttttttaaatacatttgacccaatttgtactagagtgattgctctatttttgggattggtttagaggcagctgaacgaaacttatttttcatctgtagtaaatacctttcatttaatgtgaatggtaaaatcaaagggcagacgctgaaatgagttgcaaggctgcatgtatctggaagctgctggttttctttgcctgatagctccatgggaaagatgcagttgagcgatagagtgagatccagggccagctttatgtatgatgtttctgcctgttaccagttacctagtaaaattatgactttttttggggaagaaacgtggccatccccattgatccaatgtgtctttgttctagatagtatgtaactcagctagttttgggatttggagactaccttggggggcagaagttttcccagggatagtttttgttctttatttttttaaaaatataaacactctcaagtttctctgcagctttcgtttatggacttgcagggctagtggaggctggagtcatggaaacggtgcaactcagttcccacagtaatagccctcctagttcagtcaatagcagtatttcctcagttccacttactgaaagcaaataccattgattttattattattttttttttagcacagaggaggggaatgcctctgtatcaagtgtcagagtggggatgattacaatatcatacttcactgtgatgaaaaatgctttatttcatatcattcagtttcttataagcaaaccgacatggttgaacagttttgagtctgtgtaatctgttcctggtactcttcctcccggtgctacctcttacttctctggagtgtggaactgcttgaaattaaaaatgtccagaatggagatcttcatctgccaagtcagaccttctttgatccctactgatggctgcactcacctctaagccatctctgaaccagcactaagcgcccggaggcaaaggcccatggcccatgtctctctatccccttatctagcaaagtgcctgatgtaccaggtgctttttatttgtttatttgtttttttttttttttttttttgaggctctgttgcccaggctggagtgctgtggtgcaatttcggctcactgcaagctccgcctctggggttcatacctctctcctgcctcagcctcctgagtagctgggactacagacgagcgccaacatgcctggctaatatttttgtatttttagtagagatggggtttcaccgtgttagccaggatggtctcaatctcctgaccttgtgatctgcccgcctcggcctcccaaagtgctggaattacaggcttgagccaccgcgcctggcctatatgcacatctttatcctctggagcgtcttcaaaatacagttaatagtgaagcattctgaatccccagccatgcctgatgcagtggtaggggtatacagtagatgttcagtaaataagtattgctgatgtgcaccaagcgaatgactttcccaggagaagcgccaccatcattccttcctctgagccatgtttcagattttcttgggtggcaggtccctttgtggatttcttgcaggtccttagctgggaatgagtgggaaggtgtacgtgttattcctgaaaagcttagggtctgcggcccttcttgtgcacctctgcttaaaagagcccacagtgttggctttcatagcagagcagtctaggaaattttgtactctggttccagggctcagagtagcaagagtgctgggacctgtctgagaagcagtgctgggctgtggatgcttgcctgtggcaccagatgccttacagtggccaggaatgctgcgggacagtctactttgattgctttctttcctccatggctgagatctgagtgtagtgttaactgggcttaaaaatcaagtccgttgtatctgcatggtcacgtagttcggcatctcatggcttttgcacctagaggtgtgaaccataatacctgaaacacaatttcataacctggctccttgggcttagcctatatggtggaggttaggtctgtatatcatcaagactgtgtctttgcatggttgtcattctgttggaattgaactttcttatttctgtaggcctaggttctgtctattcttctcagacagctcatatgctgcttcttcccttcagccttctctgatacttgtccactccccgcctgcctacatctgagtacttgctttccctctggacacccctgtgcccagtccaactctcctgtacagacaccagcccctttcccctggtttataactgttgtgggaagtggcgtggagtgtgatggtctgctcatgggctgtggggtctgacagcctgactctttggctgattagctgagtgactttggatggaactagaatatgagttcctagaggctgagactgcagtctgatttgggtgtatagccttgtgaacttaatcctgtgcctggcacacaggaagcacatcaggaaatgcacgtcaaatgagtgaataaataaatgaatgaccatacaaggactccatggtatattcttgtagatcattagttaattatcaacaattggctaatgattaatgtttgcctgagaggctgactttttgtccattagtaatgacatcccaggaaacacctggcagagttcgtctttaatttcaggagtatatctttctttcttggcaaatttaactattaaagagagaagaaagacaagtacttgatactttttgaatctgtaagttataaacctgtcttctgtattcaatgttgtatattagccacattgcagatgattctatttggatggatgtgtgactgtcacctttcacataaaaattgattgagccagtcatagtggtatgtgcctgtagtcccagctatgtgggaggctgaggcaggagtcttggttgagcccaggagtttgagactgtaggggactatgagtgagccactgcactctagcctgggtgacagagcaagactctatctcaaaaaaaaaaaaaaaaaaaaacaaaaaaatgtggtagaaggggagagagcctcaaaatgaccagagtagatggactcgtgtagtaaaactttacccaaagttggtttcctaatgatataatgtgaaacagtctatgtgctatacaaataattatatctcttttgttaagccttacgtcattttgacaaaggctttacttgattgagtattgacggcttttccaaaataaaatccagctcttaattgagatttgtggctgggcatagtagctcatgcttgtaatcccagcactttgggacacttagcagggaggattgctggaggccaggagttcaaaaccagaatgggcaacatagtgagattccatgtctccccccgccaaaaaaaaaaaaaaaattagctgggtgtggtggcgtgcacctgtggtcccagctactcaggaggctgaggtggggggattgcttgtgcctgggaggtcaagactatagtgagctgtgattatgttactgtactctagcctgggtgacagaatgagaccctgtctcaaaaataaaggaaaaaaagaagaatttaggttttttactattaaaattccataagaggaattccagtgggggtccttgctcatttggtttgtttttttacaatgtgaatatcattattttatagtcataccttatacaacgaacctccccatctagacccttcactagtgagactaccttagggtgaggatatttgggtatattagagtattagccagaactctttgggttacagattgtgggaatacaactcactcaaattggcttagctgaaaaaaaagtgcgtatgtatgtacaatttataaactcagttaaccaaagagtccactgggtagaaatggcatcagacacagctggaaagggggggctgaaaagatgtcaccagcattctatccctgccctgcaccctcgggtttctgagccagagtctgactgacctctagtaggtcagcctcacgttgcctatgtgtacatcttcctcagctcattttgaggagggcatgtggggacgtgcatttctttctttttttcaaattttattttattttaagttccgggatacatgtgcaggatgtgcaggtttgttacataggtaaatgcatgccacggtggtttgccgcacctatcaacccatcacctaggtattaagccctgcatgcattagctatttatcctgatgctcttcctcccacatttctttttttttgtttttagcatttattttaggtttgggggtacatgtgaaggtttgttacataggtaaacacaagtcgcacaggtttgttgtacatattatttcatcacccaggtattaagcctagtacccaatagttatcttttctgttcctctctcttcccccaccaccccgcaactcaagtagacccagtgtctgttgtttccctctgtgttcgtaagttcttatcatttagctcccgcttataagtgagagcaaggcatttctttcttaatctcagcttaagttcggcattttaacaatgattgcatcagaaacagagacctctgtagcagattggtgggtagttttctttttttttaaccttcctcattggtgtttgtttactttttaactgtctgacaaatgtgaaaagtacccaatacagggtgacagcatgcccagcagtagagacacttgggtgttaaataccagtggcggtggggacacgccccaacagaccccaacagcttctcaccaaagaaagttcctaaaggaatggaagaggttctagaattctggaggtggggtgtacagggagggaccatgtgcactgttactgttgagtggacagatgtgcagaagggaggggtgtcggcgggtgtccctgccccagcaagggtagagggctggttagcagttgatccaggagtagatgttagcatccccaccatgcagctacaggatgtggtcctcaagtcctgtctgctcatgtgatggaaataaggagagtggtggaggcgggggccttccttttttaattcaggtgagattggtattctcccagctggggttcctgtgggctgtaagggtgtttggctgggcaggcaaagccggaaatgggtggtatggaggaagaaacagaatagctgaagatgggatgaaggaggaactgcctgaactgatcagtgagctccacagccccctctgtgtgtgtgtgtgtgtgtttgagagagtaagagagagctcatgctcatgagtgtgtgagttaggggaaaggtggaggtgggcattgttgacacaggccttgcaggacgaagccttcctttggtggctttaattaagcagggccccagacactgcctgggctggagaaaatgactttcttctccagaacttcaaagcaattatttttgctaattttttccttcctccctgttaggtgagtggtagttttagaaatcacaggacatctgttgaaattattgaatgagtgaacgcgaggtgaggctggagggaatcaggggctgacccgagggagggcggggaggcaggtgcagactgctcagtgagtgtggtgggatcccggtcttggctggccctgtaggagcccagccagggaaggcaggaagaggtggcctaggttagctttgcctggggattcaaaggggccaggcgagaggctcatgctctttctccttccctttccctgccatgctcatcttctgagggctgacgctgaatccttttcctgtgtccgtcagggattcctgcataacatagactcacagatacttttttacagctataagaggacgtatttataagaaaggaaattgaggcagctttattcaacaaatattgattgagacctcctgtgcagagcacagcagccctgtgtttctgccttccagcccgctgctgtggctccccatgccttgttgtgaaggaaaacctacagtgtggggttggaaaacagccagatttgttttcatattttgcattcttactataaatcatcactcaaaattgacacaagtaatacatgaatacattgtttcaaataattaaaacaatacagataaagtaacaaacccctttacctacccaactccttctaattacaatgatcagttccgtgtgtcccttccgaattgtttttcacagcgtgtgtgtacgtatgtatatatcacctgtgcattttgaaacataaatacagtttgagtattttaaatttcgtgcaagtgggaacatgcattctatggcttcctttttcccactcaatagaccttacagacctttccatatctgtatgcagaaatctaacaacttcatagttggtgtaaaatattccatgtatgaatgtaccacagtttatttgttttctttgtgatgaacatttagggtaattccaaaagttttactgtttcaaatcatgctgcattgaatatccttttgtatgcttctttgtgcatgcaagaaaacgtttgtctgggatgacaactcagaagtaaactctccgggttggagggtatgtgcgtttttaatatccatgtttattgccacatcattcttcactaagcctgtactcttttacctcacaccacatctcactgcctcagcagtcatttcactctgcagagtgacctcatgtgttctgtatcttaggctgtacaaaaggaagtcttgggggttgggtctggcctctctctgggatgttagtagcatctggagcatctggttagagtagaaagtccacaaacctgagccctagattttaggaatctattttgcaccagtgaccagataaaaggcaccaaaacttattcttgtctcccttgctttcagtcccaggtgcttagatactattgtttcttttgagtgaaatattcattccaggtagctaataggtaaataagttcctaatacaaaaactgagtcttattttggaacgtttgcttgctacggactggtttcatgacaaatactgcctttatgtccctgttagttggggaagaagaatatccaatccggtatgtctctgatgtcccgtgttcttattatctgttttattttcacacacagtaaaatctcgctattattatggtgtttagggtttgtgcccttcttatttccgaaatctctgaggtggtttagaaaatagaatttgatgaaagtgggacaatggggaatggaagcaaagtctacttgccagggtgctcgaggggaactgattgctgacacctggacatggaattggcctcaaggtttcccagcagcggcggcgaaaaagagtacatcctgacacacagggtttttatcctttcgacaaagggaagcagccacgctcattcagagcagcactttctaggaagcacatccaaggaggaatctccagcgcaggtccttgtgtaaggtacattgttggagcacaatgagccatgtcttcgccgtgcttttgtcggggtcagaaatgccgcgcaagcagatggtccctgcattcatgtttttcaggggtcagggtacgacattaaactgtggtataatgaaaatggaagtacttctcatttctataaaaacgctgctttttgattatataaattagtataggatgaaagctgggaagatgaaaaaagagtagtttaacatagccattatttaatcattcataaagtactttttaaagcatttattacgggtaaaatatagtcccattagacacattccctctttgtgctaacttggtttaactcaaaatacaaagggatacaggaatttatgcaaagaacatcctcccctgcccccgtaaaaccatatttgaatatatgtggttttattattttactctaatgtaatttaaataaatgaccaatatttttaaaaataagaaatccttgaatattcttcagtaaatagataacaacagggtataatgaaacactgtttatatttaaatgactgctttgaaacggtgtgaaagcagcttaaatgggtaaaatgctgcccttttatgtcagtaattagccccttggtcttttttcacgataatgcaaaattgtacttctctgtaggcttacacaaattctgaattattgaaatataaattaatggtgaatctttctaaagctcttttcagaatttttatctggtgggagtgaaattaaaacatccaaaattctaaattagaatgtggcaaagtagagacagccagctagaatttggtaaaagacaggtgtttaataaatcttttcctagacatccatgggttggtactagtgtggtggggtagagaaagctttggcgtgttttaggttggccaaatgaatcagttaattgatgttattaaagccaggtgggacaatagtaggttagaccgcctggttttgattgaccctgaatgaggaatcacagacatgatgaggttgggattggagaggacatcagaaacctccatatgggtctgttcctttttcagacccgccagcatgacctgccctgggttacacagtgagagacgaaccgcatggggatgtagggcagagcatctgtctcccaatctgttttcttcctacccacctcagttacaactatgactccaggttgaagttgggcatctcctatctgaccaagggacagggtctaagaacagcaggggcagtgatgacaaaagattgtctctttaaagcaagctgggcattgagtcaacttttcattatctcttcaattattttctttgtgtagtattaggtcggtgcaaacctaatgacggtttttgccataatacatcttccgaaagatagtttccatcacctctccctcccctgcttaatttcataaaatactttattgctttcttcatacataccaacctgtagaaatcatttgaccatagattgccacatttattttatggaaatagccagggcacaggccagcggatgtagtagggcaggagagaatcagcagagctggctaacaaatgcagtgggtctttcctcagtttcttgtttttgtgtggttagcttgccctgtctttctgactataactggaggcacagtggttattgcctttgttactagctgacattggctgacattgctgagctaggtgggctttctatatagggtcctgtgctgaataacagtgtttcagttcatcagccaagatcaaagtcggtggtcccataagattataatggagctaaaaaattcttgttgcctagtgacatcgtagtcattgtgcctttgtaacattgtagcacaattactttattttaaaaataaatttggtagccaggcgtgcctcacacctgtaatcctagcactttgggaggacgaggtgggcagattgcttgagttcaggagttcgagaccagctggtgaaacctcgtctctaccaaaaatacaaaaaaattagctgggcgtggtggcacacgcctgtgattgcagctactcaggaggctgaggtgggagaatcacttgagcctgggtgatggagattgcagtaagccgagattgtgccactttattccatcctaggtgactgagaccccgtctgaaaaaataaaaataagtaaattcaatgtagtctgagtgtacggtatttataaagtgtatggtagtgtaggctttcacattcactcatcactactgactcactcagagcaacttccagtcctgcaagctccattcatggtgagtgccctctacaggtgtactgtattttggcttttatacagtatttttactgtaccttttgtatatttagatacaactggtgttataattgcctatagtattcagcacagtcacatgctgtacaggtttgtggcctagcagcaacaggcgatcccatataacctaggtatgtagtaggtggtaccatctaggtctgtgtaagtacactccgtgttcacacagtgatgaaattgcctaacaatgcacttttcaggaccctgttgtttatacctgttgttaagctatgcatgactgtaatctcctctaattcccatttaatctttaccataaacccacaagggagatactgttaaaaaaatcctcattttacaggtgaggaaacaaggctagaaatggttatattgcttgcacgaggccgtgctcctggtaattggcagggccaggattcacacccggacttctgactcaagcgcccacgctcaagtactaggccatgaaagggagtccaggctcacaggctgatgatgcctaaacaccaagcggaggagggtatgaccaaagggcagagccagagaggagaccatgggggagctgacggcagaaccttttgggggcgtggggggtgggggtctctctggctaggcttcacattcatgcttttgattagtgattggaaccaaggtctggggactggcatagaaactttccaggttaggattcagtcccagctttgcctttcactggctctgtgactgggtcaagccctttctgcatctgctctttctctgtggaagaggaaataaaatggctaaaggtgttatcacaggccctggctcctagaaagcactgtgctgtgagccagaggtttaagatgggcttcagcctcacagcagtcctgtgaggtaggtgtcgttagccttagctgtagatgaagaaactgaggcttgggaagaccagccggcttgctctggggcacctggtgaagagctggctggatggaggattggatagtgatgggtccctcctgccatactagaagagcttcctggacagtttgcttggattggagtttaatttctaaagccatttttttaggtgttcttaccagactgagctagtgcatctgtcccaccgaatagcctaagactttagtggtcatagagggttttgcagcggatctggtgaagaaatgaactgaaaatgagcctgctggccataggagggcctagacctggaccataccccatcatcatttagacaataaagggtggttaattcccttggaacaccaaggacagagagggggctagtttaatggtcaggatctgattctgctgcagctagaagactgaagcctgcctctacatggtggtccggggtaaaaagttcaaagctcagcacactacccacaaggcttggtggtttctttacgtgtgactttctcagccgacttgaaatccaccaggtgtctcttgttctctgcttggcccaggtgggagcccctgattgtctcttgacttaaatgttgctcagaagaggaaataaagcaggagctaaggagcacaacgatgtcagggggattctggcccgatggtcgtgcagttcctagatttggagtcgtgaaaacaatcactaacacctgcgtggtcagggacggcctatacggcacttcatcatagggtctgatttttatcctcacagcagccttgtgaacattgctgatatttgacacaccaggcagccaaggtgtggggcagttgaatgacttgcccaagagcaaacagcaagtaagcagcagaattaggatgtggacctctcctgccctttctgccacactgtgttcctcgtgtcatggagtcctccctgcaggtcactcgggtaagagaccaaggctcacagatgggagctggcttgccagagctagggctcctcaggacccaggtgatgggcttgcttctctgacatgtggtccctgacctctgttttctcacctgtaagatggggatcatagcattattaatagtcatgttgttgagaggattaaaggcgattttgcaagggaaccctctgtgaacaacagatgctggcccattgatttccttgtgcatctagtcccactttctcaggcatttaggctctgccctgctctggctctctctctcttcagccttccaccgtatcaggagagtggagactctggaggaagacagatcttggtttggtttctaggtttgatgctgactgactgggtttgggaatgaacaaatgatctcacctcccttggtctggcttcctcatctgtaaaacagagataataattctcatctcacttttcatgtgggatctttgtgaggagtcaatacaaataatgtgcgagggagctctcatttaccagaaggcattagttaactggtcaagaatagttcaagagagtcttacctcccagtgaagtttaaggtttggcagtatctgagcactgggggaatcttttcctataccccccttgaagtgccatagggttttgagaatcagtcacacggcacacctgttaaatccctgtgttcttccatgattgctgcctttctttgccttatgattttttcccttattgtggcctagtccacggaggttggaaagaggagtgtgcccttcccttcccttccctttcctcagcaaggggctagtttctactcatagctcagggctcacccacagcatagcgctgtgtggaagcctggtgggggcactgggtgagtggtgctgcagcagaaaggcctcctgctgagacgctgaggtcagcattttcagcggcagggagccctgtgactgaaagcagaaagaccaagtacagtgtgaggactcgggttggtgtttgtggccacattgatggcttcatggaagtatgttcccctctgtgcaatgaactagtagggcctgtgtcttggggcctgcaccttttgattgcaggcaccaggcccagcattttttctgtgttgcctatctggacgacaagccatacggtagttactagcgtccccattttgcaggtgaggcagatgaagctaggaggcgttaacttaaatgactctttgctgagggaataaacccataagatgacaaatgaggtctgtggtcactttcttcactgttgcagtgctgtgcccagcactgagtgtgagggatgtcatggagagaatgctgaatttggagtccggtggcctggctttgagtccctgctctgtaactttacttcgttgtgaccctcactttcttcattggtcataaagcaggaggtaaaaatttaaatgagatctgtgtgaaagcgttttataatctacgaagctatatacacatgggcggcatcatccttatggctgtctgttgagagagggcctcgaggagaggacttggcttcatcttgccttctaatccctcactgcaaggccctgaatcctaatccctcactgcaaggccctgaatcctaattccactccatctctccatgatgccagtgccacatctgggacctacgcagaagagtcatacctgccagcacagctatggtgattgtgcttgggaagaagttgaagttgcagaaggaaggtggtagagagggactgaaagagccaaccaggccagagctcgacaggaccctccctccttccctacccttcagacaggagctgcatcaccattttcttttccttttctttctttctttttttttttttttagacagagtctcactctgtcacccaggctggagtgcagtggcagtatcttggctcactgcaacctctgcctcccaggttcaagcgattcttctgcctcagcctcctgagtagctggggctacaggcgtgcgccaccacacccagctaatttttgtatttttagtagagacggggtttcaccatattggccaggctggtctcaaactcctgaccttgtgatccacccatctcagcctcccaaagtgctgggattacaggcatgagccaccgtgcccggccatgcatcacgattttcaaaggccagcttcctgactgttccttgaactccttgagataggtatttactgtgcttgtgacatgcaaactgcaaataattcttgcctcataatggataggcctgtaacccagccagccctctaggcaagcaaatgttatttcctagttttaagtgtgagcttaatatgtgaattaatttcacatcttcatcctcttcctaaatctgtctttgttttgtctgatgaataactgaagtaatggatttggtcacaccactagctgggtagccacctgaggctggagttctgatatgtgggtcttgcctgctttctctgcactgtggctttgcacgtcgggtgctgaagctggggagctggaatcagctggtgtgttctctgtagaactgagaggactagcaccctggggtggaagcagccctgccttctgaaccacagacttgcttgtgtttgatcttatgctgttttcttactatttctgataagaatgtgaactccttgtgagcagggacccagtgtcccatttctcttaaatcctctacagctgctggcatgggatgtttggtaaataatagaccatttaatgaagcatcactctgtctgtaccaggcaccttgaagttgctttgattgctttgcctgttttcctaataggtgtccggtggtctctctttccaatgcaggaacagagtgctggaggtagagactgtgattgcttaatgaagatatcagaacttgcacaacccacacatagggctcccatcaaagcagtagttctagggctgcaacctcttcccaaagatgttgcaacacttgtcttcagagccagtttctgcttttcattttcctttgcttctggctaaaaatgggatcctgttgtcactgaccttactccccgtcttttctttaagaaactcttgagtatttgtaagaaaatcaaatctatcttcaaataaccaagttttcttatctttgagaatcttgagtgcaatgtgtcatgggctctgaaggtcttacgttgaggaatggcaatattatcagaattacgtgtccagcttcccaagcttactactttgaaggaacacatatttacacaattctgatgtgtttattaaacaaacagctttaccacttcgcagtcacgcttctctaagtctgcagtctcgtctggcctgactttctccttgtgccaagaattccttcaccttttctctttagcctttggccccaggaaaatgggaaagtaagatattttactcctggccaatgcctgatttttagaagccttcctcactccctggcaaggcacattttcctgttacctcagagtaaagagactcggttctggggttctgcatagtgatgctacatgcctgacccttgctagggtttgagggtccttgggaactgatgcaatcgtagaagtcacagctgtcattcaggttatttacagaagtagacagaattgcttcacttgccagcagggcgtcttgagcttgactcagaaggatatgtaagtttctgctttttttttcttgcctgtttcaaaaacgcatttttgataccaggaaagttagacaatttaatcttatctgtagcagagggagcttcatccttgctgtgtgaagctgtgcgagacgacaaagactgttgtagaaagaggcctcttgcttataattgaagcatctttgacctgagtcagtgttctgcagccaggatcagataatcagcactggtcactggcacctggcattgggacctggaggcaaagaataacagaattaattggtttccagtaagtagcagggatcatggcatgttcatactttttaaaagaagccttattgagattgagatataattcacacaccctatacttaactaatttaaatcatacaattcagtgttttttactatattcactgttaagcaaccatcatcaaaatcaactttagaacattttcatcacccaaagaaaccccatacctattagctgtcaccccattttccattctattccccctccctagccccagccctaggcaattgctaatctgctttctgtctgtggatttacctattctgaatatttcatataaacgggatcatacaatatgtgtcctttttgcctggcttagcataatgttttcaaggttgattcatactatcgtgtgtatcactacttcattcctttttatggtagaataatcgtccactaaagggacataccacatttatttatctcttcatcaactgatgaacatttgagtgttttcccctttttggctattatgaataatgttgctgtgaacattcatgtgcaagtattttgtgaacttaagttttcaattctcttggctatattcctgggagtggaattgctaggtcatatggtaactttcccattttgagggactgccaagctgcttgccaaagcagctgcgccattttacattaccaccagcaacatgtggaggttccaatttctgtacgtctttgctaacacttgttattgtctatctttttaattatagccatcatagtgcatatgaagtggtatctcattgtagttttgatttgcatttctctgatgactaataatagtgagcatcttttcatgtgcttattagccgtttgtatcaaatcctttgctcatttttaaattgaatttttaaaattattggtttgtggcagggcatggtggctcatgcctgtaatcccagcactttgggaggccaaggcgggtcggtcacctgaggccaggagttcgagaccagcctggccagcatggtgaaaccctgtctctactaaaaatacaaaaaatagtcagacatggtcacaggcatctgtagtcccagctacttgggaggttcaagccggagaatcgcttgaacccaggaggtggaggttgcagtgagcctagatcatgccactgcactccagcctgggcaacagagtgagactcaatctcaaaaaaaaaaaaattattggtttataagacttcttcatatattctgtataccagttcctttttggatttatgatttgcaaactcctttctttctttctttctttctttctttctttctttctttctttcttttcttttcttttcttttctttttctttcttttctttctttctcctttcctttcctcctgtcctttcctctctccctttctctttcttttccttttctttctttcttctttttttctttctttccttttttcctctctctctttccctatttctttctcttttcttcaggcttttgccctgctggccatactggagtacagtggtatcatcatagctcactgcaactttgaactcctgggctcaagcaatcctcctgcctcagcttcctgagtagctaggattacaggtgtgtgccacccaacctgtgctaatttttaaaaatttttgtagagatgggggtcctgctacgttgcccaaactggtcttgaaatcctggcctcaagcgattccctgcctcagcttcctaaagcattggtgttccaggcatgagctactcactgctggcctcttcaatttcttgatggtatccttcaagcacaaaagtttttacttttgatgacgcgtaatatacattgttagaaggccatagctggattgagtcttcaaggttgcctgttccaactcccttgtcggagtaacgggaggcactgtgatcagagaggaggggcctttctgagggtcacagacccacaaaaccaggactggagtataagtctctggactttcaccttgggacattctcagtttccaccccactgtttctgagggtcgaaaggtttgggtgtatatgtagggaaagataattggtaggctctgaagcacacagttcatttgtttttcaataaggaagagtcatgttagaaattttgtcctttcttccagaaggtacactatatagcctggagccacactgtccaaaatggtagtcactggccacatgtcattataagaacttaaactaattaaaattaaatgaaatttaagattctcagtcataaagctgtattttggctaagcattgtgacttatgcccataatcccagtattttgagaggctgaggcaggattgcttgaggccatgagttggagaacagcctggaaaacatagtgagaccccatctctaccaaaaaaaaaaaaaaaagaaattagccaggcatggtggtgtgtgcttgtagtcctagctagctacccaggaggctgaggtaggaggattgcttcagcccaggagttcaaagttgcagtgatttgtgatcatgccactgcactctagcctgagtgacagagcgagaagctgggggaaaaaaaaccacatttccattgttccttatttatatatggccaccgtattagacgacatatgggttgtttccatgattgcagccagtcctgttgggcagcactggctatacccactggcattctgtccactcctgacccagtggtgccctagacacccagctgtgatctgtcttctgtgggtccctcatctacctgctgctcaggcttcttctttatgtagttgcctctgggcttcctagcaagccccctacccagactagatggtctgtgggccctgcaggcagagacacttcttctgcatagtttttggatgtggttgccagtataaaggctagtgcctttcctcacctcagccaataggtgtgacttgcagaaatagagctgaaagatgcttgcaagaagtgtgttctttcttggagaggttagctcctaaaagtgaatgctgaatgagtggatgaattgatctactctttggactaggggaagatgttgaagaattttttatcgaaaattttattgatatgtaataattgtacatatgtatggggtacatgtgctattttgatacatgcctgtaaggtgtaatgatcatagtgggtaattagggtatccgccacctcaaacactatttctttgtgttgggaacatttcaaatcttctattttgaaatatacaataaattattaactattagtcaccctactgtgctatcaaacactagagcttatttcttccatctaactgtgtgtttgacccattaaccaacctctcttcatccccctccagcccctcttctcagcctctgataactattattctactccctgtctccatgagatcagcttttttagttcccacataagagtgagaacatgcgatatttttctttctgtgcctggcttatttcacttaccgtgatggaagttggagtactctcgagtttagttcttttggctgcattggttggtggtgttttgggtgggtacttcattttagaggcagtcagttccaagaatttgcaagatgctgagtgaagtggggcaagaggcaggagttggaacactgggtgttctgagacagtgacatgagggagatgggtgtagtcctgctgggtgccctgtgtagaggtttcctttatttcaggttcctgtaaccctgagggccatctgagccatcaatccaaggtcaacaggctatggaaaaaatctcaaaactgctctatgtaaaaggatgttttacccacatcttagtgatgggagatactgtagtttggaccaagctaggatattatagaccagaaatgagtctggggactatctcagacatgagaaaggattgaccaagaatcatagcaaattcacagtggcacaactgagactggcatccagggcctctggcgcttcgccataggcacattccaagtgccatggtgtatgtcttcatttacacaaggacaggtacttcatacacacaaacaagcaaagcaacttcttggagacattgcccaggcttagattttaatttatttaacccacgttaggcactcagtcctgccttcaggcccccctttgccactctcataattagaaggtattaagaaacctttcaattacggcaagatcaccagggttctcatttctttttcttatctccagcctatctctagaatctattttttgcagggaggactgtccttgactttaaagaaagcattcagaaacaaagagacttgttatttttgaggtcagcctcctccaccagactctgagagccttgagggcaaggacagtgttgtctcttatcactactcaaggactggtgcagagtgttcatttggtgaatatctgtgaaattctcatttttaggagaactcccttttgctgggcttctcaggtatgaggtcccttttccatatggtcctgaaactttatcaattccagtttagaagtagcgacctgaggaaatggaataattcttctgtccatggtgaggggaggatggggggaaggtgctcattttgcctttgaacttgataagagcagagaacagtcaggtttgtgctgagaatgtaagggttactttttcctgaattgggcagtgggtggatggagcccaacaggacatcctgggaaggattcccagagcagggagagggcaagcacagaattgtggaaggaattccgtgccataaacacagaatatcttatttaacagtggaacttttttgctgtcttctttagaggtggaaaacagttctttccaaagacaagcttaatgactgctgtgccaacacacaaaactacaagatacatttaagcatcagtttagcaccagaaatgcagtttacagaagatttgcatgaaaatcttaaaaacaggttgaaaatgtcctaggctcagctagtgcacttttaagttagtaggaacagggctctagggatgagatgatggagcagggatgtgacataggtcaggggtacatgtgtacctggcctttgaagcctcttttggggttcattttaattaatttcttgttcagcttttaccatgggcctaagtttctctggttggagcagagtaagttttcaggctgaatttcttggatcattgcctttgttttctttttcacatagcctgtggatgtctggccttttcagccaaggaaagaaaatggaaatggttttaaacactcactcacttgagccatgaatttcaaccatatattaattttgcttatttttggattttcaaatcttctgagaagcaatgaaatgacacaggggcaggccactagggtgctttggaggttctgcgtggcctggagcagtggggagaggctcgggagagtggaactgtgccctcccactcgtgctacccacacagcagcctcctccctcactctctccttcatgtatgtgtgtttgaggttctgcttagcactttatttggggaaaataagttttctgaaaacttattttgtaggcaatagaggagagattggtgtatgtcttatccttactcgagttggcaaggactctgggccgaatatttagggcttggctcttgctccctctacctaggtggattatgcagtgagatctcacttgcctttaactcatagttattgcttagctcttaggagcagtagaagtaaaaatcctggtatcgtaaatgagcacaatccctgtaataagtgatttctgtgtattattggtagcttgaaaaatattaagtgttacctccattttttaaatatgaaataaagggctagatcaggacatgaactcattcctgttgtcttccagagctattttactaaggaggagatgacccagtggtgaagagtaggtagcagcatgtcaaacctggtagctttgcagtaggggaggtgggcagtacagtgggaataagctagaactaataattcagtgatcatatggggccttgcaggtttttgttattttctgcttgggtgtaggttttgctttgcaaagtctgaaggtgacctatataattcccatatatttggagctctcaggatgtgccaaggatcagcccaattctctgaacgttaactgagggagtcaggagtccttcctgacctcaagaagctcacagttcagttggggatagatggccttgagcttgtgttttagagctctggtcccaggtagtgagctcaaacccagcacagactagattaagccaaagaggaatttattggctcacattgctggccagtccagggataaactggagtcagctcaggcgctcaaatgatgtcaccaggatctggtttctctctctccagcctggctccacttcctgtatgttgattccattctcaagaattctcagacacgacctccccttgtaattgcaggatggctgccaacagtttctaggcctacgcctttccaccttccagcaaaagagagtgtgagagtctttgtcccagtccttccagatggagtcttgtttcttcccattgtctcagattgggtcacgcgcacatccggaaccagttgcaaggccagggacgtgtgcagcactgctgacgtggggccaggtcatgtgcgtcacccctcgacctggggaggagccaactctaccctaagttcctgggctaagaatggaaagagagtcaagtattggttattggggaaaggtaatgatgtaggcttgaactctggcctgacccattgtcaggacagcctgaacttggggctgtattcccacctgacatagccttaagtcagaatttattccagtatgagtacagcatcttgttaccatgtggttttagctgcactgtggatttagacaccaaatcttgtcttccctgagaacattgtccttcctagaggtggggtggaaaacttatttcaggtaagcattcggaccttgaccctaaccttaatggtgattactgttcgaggtttttcaaacacatagtgaataaggacagctggtgcaatggcacgccctccaattggctacgttacacagataaacattcttaatctttctgaggttttgtatagaagagtggagaattgtaccaacttttctccccccggttgtacatcttcactttgtcaccaagcctggattcctcatctgtaaaatagtatcccctcagagttgctatgagaaataaatgaagtgatttgagtaaggcatggcacctggaacatagtacatcgtgcataagaagcagctattgttattatctcctaatttgtcaaatgagcagggcgtattgccagataagctctttaaagttttaatgttcacattctataaatctaggaaaatctttcctccactgcccacccacacttggattttgagaactgcatcttcattgagggtaacgtgttagaaagctctcaaacattatagccctcacagaatgtatagtacttcataattcaccaagtactttcgtgtccattctctcattcaatcctagaacaatctatgatgaaacaaagcaggtatcacaattcctgttttatagatcagaaaacttagggcttagagagatcaaatgacttacccaagggcatagtggctggaaggttgcagggcaaggcctattgccagaatcttctcagatatcccatgtctgttggagcattcttctactccagtgtggatttgcctttctgatggctttgactggagaactgtattgggtagttcatcaaaataagaagccttgagttcatatagtgaaaaataagatcaccttttccctttgttcattggcttgatttattaggattgtattctcaaacctttcctgctattaaaggaaatgaccttagtttgtgttgcatgaaatagcattaagtcaagtttacaacatttcaaagttatggtcagtagcattccaattagaacctaaaaagcttacctagctgaggtttaagtcgttgatcttggaaaaggtaaagacttctcagggaggttgggctgctgtgtatgacagctagaccctcagttcttggtctgttaacatgtggcccatttcttcctatccatgcccctccataaagctttgtgcgctggtagtatttacagtactggatgataattatggcattaattatttgagataaatggagtgtgcccagtagccaatagactattgttagagtattattagtatttttataggtcttttggatagcattctatttcaagacatttgaaaatgtagaccagattagtcaaaagcattgtacatgatctgtccatgagtgtaggctctcattagaacttctggaatcattctgaaatatacccagctagataatactaagtcataccaattaaaaggaaagacttgagtttgagttatagaatgttggagagaaatctagtttattacttttaatattgaagtcaaattttgatttttcttttatggttaatattacctgggtcctaagaaagattgcaaacatgttttcttaccttttttcttgtagaagctttatatgatgttagcttttgcatttaggtctgtggtccatttcaaattaatttcttttctatggtatgaggttggggttaagaggttaattccagccacctcccttgtgggtatccagttgctccagcaacatatgttgaaaatgctttcctgtcctcatttaattgctttggtacctttattgaaaatcaatggatcacataaatttggttctgtttctagggtctctgttctgttccattgacacatttgtctttatgctatctctgtactgttattattactgatgctttgttttaagtctaaacattggattatataagttcttccatttttgttctccacccctcactacaagattgtattggctattctaggtcctttgcatttctatctaaattttagaattaacttgtcaatttctataaaacagccttctggggttttgattgagatgacgtcgaatctataggtcaatttggggagaaggatagcttaagaacattgagtcttctaatcactgagtgtgatgtatctctttagatcttctctaatttttctcagcaatgttattagtatagaggtcttacatgtattttatttatccctaatttttatattatttttgattttattgcacatagaattttaaaaagaatcttctagttgtttattactagtatatggaaacatgcttgatttttgtatatgttgccttgtacatgccgccttgtcacatttacttattacttccagtagtttttgaagattctttagaattttctatgaacacaattattttgtgaataaagatagttttgtttcttccattctaatacttatttatgtatatatgtatgtatgtatttttcttgccttgtaacattggctaagaccttccatatggtatagaatagaaatggtaagagtgtagacattcttgccttcttcttgaactcagaaagtgtttattctttcatcactgagtacagtgttagttggaggttctgcataggtgtcctttattggttgaggaagtttccttctgtttctattttcctgagagtttttattatgaaaggatgttgaattttgtcaaatgtcttttctacatgtattgagataatcatatggtttttctcctttattttattgtggtaaattccattgaattttgcatgttaaaccaattttgcattcccaggacgcacctcacttggtcctgatatattatcctttttatatattgagggatttgattttctagtattttagcataggctttttacatgtatgttcttgagggatattgggtctgtacattttctttgtaatgtccctgtctggctttggtgtctgggttgtgctggactcataatgtgagaaatagtgtggtaccagttgctctgtcatgaccagcagcagaagtctagttttctttaagtgtgtagagtgatgactgttaggtaaagagttagaattattttaatgatcagccaagagtctctgctaagtaacatgaggtatctgtgaaatggcatacataactgttgtgtatgaagcagtgcatcagagaggctgggaaatactttaagtgggttgagcaactcataccattccttatgctaaaattgtacttatattttattagcaaaatttcttttatcactgagagaatgaattatctatctgattgccactcataatttatggagttatcagttaataaggttttattgtatgttaatatgagactcatttttttcctttctctcctctttgggttgtatttcttccaagtaagagcttaaattcatgggtcagctagtactgaccagcatctgttgagttattttgcataaatttggttacctggcctcagataagaatgtttttttaatctgtattggtggcattgttggttgctgatactgctgtagtttgttcttgcaagacttctgtttaaaagaagggttataaattcagtgtaactcagagcagaggtaaagtatagaatggaattagaagaaaacgaagcatcaatttcagtaaagtagaaatcgtttattaaataagcggtgggtgacagggaattgggagtaaccatcctggttcccatagtgatggtgcatccaggaaaaatacagggaaaaagggaatcattatggaagagttttgggtgtgtgttgtcatgctttaggaaacttgccaatttctacacctctgtcttcagattgtcgtgtttagacacacatcccacacaaagtgctcagcagtacttcttgtgctcgtctttatcccctggaatctagaggatggcacctctgggggagttattgtctcacatgatttagaaagacctccactattttctttccaagagtcgaaggaaggtgggtgagttggcctggcacctataagcagggacctacaacactgcttgaagcacctggtgacatctgcttgacaggcttcccctccccactgttgtcaccacttccatgggtggtgggtggtgttgcacggtgcccatggggtggtgtgcatgttctccaatgccacctgccctgcctcagtgctgcctcctgtaacagtctcatttgtttcgctggagtatccttatcgaaaaggtcttggggaccatttgcctaaaatgttccccagcatgaaatgtcccccacacttgctctgcacccgtgcacatcctccttttctttttttttttctgagacaaggtcttgctctgttgcccaggctggagtgcagtggcacaatcagtgctcactgcagccttgactcctgggctcaagcaatcctcctacctcagcctcccgagtagctgggactataagagtcccaccatgcccagctaattttaattttttttttttttttttgtagaggtgagggtctcagtatgttgcttaggctggtcttgaactcctggcctcaagcagtcctcttgcctcagcctcccactgggattataggcatgagccactgtgcccagcctcctcctcatttttgtagacatatcaagtctggcctccttcaggaagccttccctaactaactaatcaagctccccgtgtttctttcctttaggatctattttttggatgtgtatggtttaatatacccttaagaataatgcgtttggaattgtaattgagaagacaaggtttacgttagcagattatagtctaactctgatttttagaaaagtgatatagaatagagacttaaaaaaaatgacattctcacataggttttggatatttggagataggaggaaaaacatgtctttaaaccacacaatgggaagtgaagtgtttgcaacaaccagaacatttaggttataaagtgtcagagcagataatttaggctaaaagaaacaaagttaaatgatttggtgggggcttgatttctctggattgacccccctggactattggctgtttccttcacttccagactgtctggtaagatttttctacagaggtaccttcttattaatgaattcttcccatcacacccactctgtttgaatttctgaattaccttctccttttggtttctgtatctcaactttcttcttattgagtcttctctgacagtttctttgagggtattgctatcagagtcagacatgcccatgacaagattccaggctgtgtaatcttgagcaaatcaatcttgctggtctactttttttcttaaaagaacaaggaagcttgccttgcagggtggttagaatttgagacaatgtatgttgcatgcccagcaggtggcaggtagctaataacaggtgtgtgcttgctctacaccagggatcccctcggtctttggtctttgcatatcatagatactcagtaagcgctctcccaaaggattactgacttaacaggtagggtaatgtttatagccaaggggaggtgagtgtcatcaggcccaggtttgtatgcctatttctactgaattgtcgcaaagttatgtttcatcctatttaccaagttgtatttacagaagactagtcctgttataacaaagcccattgaaacaacacccaggaagtagaccacaagaagtcagtgggtatcttactctgtgtcctgcagggggatctggaaatgaataagggagagagaaaatgtggagtgcagaggatgctgcctggaggtgagactttaaccacatgattattctcagttatggagcaatggctttgttccaggcattgtctccaatagtcacaatcacaccatagggctgatgttttttctatcccactgaggtgtaaacagaggccccaagaggttgcatctggaggtgcgtgagcaaaatttggagagaagtaccaagtgggcacttcacaacaggtgaagagaatgaagagatggataaagataagtgttaagcactttttggtggtactggaactttatcatgtctcttgatttttaagaaaagtggcctattgactagaatttgagactttcattatattgttcagttggcttttgcatgtatattgcttttatgtttttgatgcgttttttcaaaaccctttaaattagttggattttatgttgttcttaagtttgatgaggtagacacttttttagctgggaggaatagagaggcagtgagtgtgttaacagaacacagcaacctcagactccagcccccgctctccttttatccagcggtgtgacgttgagcctgatgcatgacatcttggcagcagaggtgctggtgctctgtcaggctccgggacccctgactgaacatgcctagggtcatgaggaggtttttgttcctgtaacattggccacaactgcacagccagtgggtgaggatgctgagatacaaactgagaattttgcacttcgacctaggctctttgctagatcaaacttcttttgatgtcttagccatgatccctctgagatatctctctccaagttattaatatatctgtgtttcccatcatgtttccccttttgtcttggcttcaaagaagctcagagctaaatttattgcttgattatagttgctggattggccaaggtttaaaatttatgtttttaacttttttatgtgattccctccccattttcattttgatagtcttattgtttattgtatatcaccttaaatactttgagaagtagatcgggtctacgtttaaaaatcgcgtatgtgggaggagagggccattcggcaaatgggaaagagattggggtgactttggccaaaaaagtttgggatagatttttgtattctcttgtattatgttattccctatcagatggtctttgcagctcatttttctgtcttcttctgtgtggtcagaatcaggggagagtttttctttataaaaatgatttgttttcctgatagaacagtgctggtgggtaacattcagttctgaccttgtaggcagacctgggattcccagagggtgcagggaccgcagcactcactcttctttgtgacaggcctgaggcagcttccctggggtccccagcctgcctcctccacggctgctatggccgtgggcgctgagcacgtgcagctgctgcctgatgctcctggacagggaaggatagattttgggcatagttactaggtgtcactgtctccttttttcagcctggcttttacaagtagttgtaatttacttgacaaacacttatttggcatttccttcaatacgctgggtactgagatggttactgcatttttaggcatttaacggggataatagcatcatcgttaataattacaaatatgatcgatccatcatataggcaatacatttcagaagaatattattaaaaagactcatagtagtgggtgtatgcagctgtagtagaggagctgaagccactgagttaccccggggttcaagatggggagcagcattcccatctgtaggttgtgttcttgagtgggaaggcctccttggatacctctcgacagtaattccaggtacttgagctcacaaagaaagtgtctggggccctcagccctttggtgtggctcccagggacgcctgagttatttccagaagtggcgtggtgggtagagtgtgagggcaggcctcgcctccctgcccctctcccctgtgtggcttttcctttctgtaattcaactgattgcttttccttccaaattgctggcttaagctttatcttatctaattttatctcctccagccttgtacgtccagagcatcattagggcctgtgcccattctgtccctcccacttctcttggtctccctccacgtcctgaggggatagaaagacggagtctgcataacctccgcatcttcctgcctgggagggcggctagggtggtgcctgcagcctctggaacctctccattctgtgtgcccctcaacctcatggacatactggcgtttcaggacctggccctgctttctctgtccccgtctctctctgcccactggtttctgtgacccacgcccttcccaccccattctgccccttttcctcacttgcttttcttaccttctgtcacattcacatgctcactatttctttttactccaagcatctgttcctctaaatcatgaactgtagttggcataattaaatatgtaatgtgtttattttaatatcaatatgtcttttcatacacatattagtaagagacttggctgtcagcgccgggccagatcaccatttgcagatgtccactcacgccagctcccccacggaacgtttcttatgcacctcatcagttctctttctccttgtctctctttctgtctctgtgtctctttgttctgtgtacatctctctgtatgtccctggcttcctctctaacacaaattgctccaataggccggcaccttttcctctccgtaaaccccagtttgtaggtacacacaggcacccaggcaagggtagagaaaccaaagagcgcttgttcacacttgctcacacaaggaccagcagagacctagagctgcatgccacgtctttattatccttgctgctagctcctctggtacagcagcactgtgacagtttggaatttgagcctgggcactctcccctgagtgcatcggtgacgtaaaggcaggcaggcaggagcaatcacagcctcccgtcgcctgtgtgtcccaagtgagccccctccccaaagggatgtagggaagccagtccatctgcaaggtatctggagtggagtgacaggaagcagaggatccagtattattggaatagattacatggtatgtgcttgtcacttccgtttaaaggtaaatacaaatctgtctttggcttagaattctagcctcctgacctggggggtgaatattgactggcaggctttacctcccatgtagaaaagagttgcgtgccagggttataaattagagctctgcattggatggatcttcttaatgttttctgtggagtggaattagaacatgttgtttcttttgaggttgcaaaaagcaaacaaggatccctttcctcccagactagtgggaagtagactaattacttgaaatcctgttttatcagccataaaactgagatgaaagctggggcagttatgaagatcctgatatatcctagaccacaaatttctattccttttctggaagagaaaaactgcattttaggtttagataatttggtcaaattttttaggctatcaaatgcaaagattaagtttctagagtcttgaattttagcacagagatagcatcacttaaccttcccgagtgaaaattcctgccttctaggtggtggggaagatcaaacgagctgtggatgccagcatacttaatatgtgttcagtagatattagtgacagattcagtggatatgacggctgaaggcctgggtggctcttctgggcttgttggttggtttcattataatgtatatggttggacctaagataacccatgtttgtgcttctgtggacactggtgctttcagggtcttaactatattgttttcatggaaactttgaaaggactcatggctccaaaaggggctgaaaagttttgaatttccttttttctttctttgcaaaagattttacagcttaagtcatgtaattaataacaggggaggttaagagtcaaagatttttctcttaccctggtcattttcgaagctgcacttggcatgggttgaagcaaatttgtgtcttcttgaccatttacttttttttttaactgagaaaatagattctatctctaatgaagtaattgtaaacagccttgttaacatatggtactgattttttcacagaagcattgttgaaatgcatgggaactaccaggttaaaagacataaaaatagacaatctatatagtccagatggtatctccaaactaggggatccaagtggcatgagaaactgtctagagcaggagtggcaaacacggcccccgggccaacacggccttatgcctctttttgtatggcctgtgaactaagaatggtgttttacattttttaatgtttgaacaaatagctgaagaatagtaatatcttgtgacatataaaaatggtacaaaattcacatttcagttaccataagtaaagttttattggaacacagccccactcatccatttacgtattatctatgggtattttcctgctacaatggcagaaatgagtagttgcctaagatatttgctgtctggtcctttacagaaaaagtttgccaatctttggtctagatggtgaggaattttagttctcctatgtgttaactgatacatgatttcgttttgaagttcagcttttaactttcggttatttttctttctacttttattttttactaataaagacagaagaaaaccatggctggttagtctcactgctcagactatgccttctaatgtttttgataataaaagttaaaatgcacatgctaattttatttcaaacagtataagaaagcaaaatctctctcctacattgtcctttattccaattcctttacccagtgttaacatttaatagttaacattccaaaaaatgttttgtttatactagaatatatattcttttcaaaagcttttcttaagcttagtttactagtaaaaatactcttaaccttttactatgaaaaaaattcaaatatgtacagcacaagacagaaaagtgtaatgaaccctgtgtacccatcattcagctttcataactcttcgtcttatagccaatcttatttaatttgtggaatccatttcctgtattattttgaagcaaatctcaggtatatcatttttttctcaggtatatcagcaaatctcaggtatatcattttatctgtagatatttcagtatgtatctctaaaatataataacttttaaaaaacataaccacagtctgctaacacatgagaaaaaaataataattccttagtgtatatttgagcactgagtattacctataattgtctccccacacccacagttgtcttttaaatgtcatagtttattttactctctttgaattaggatacaggtaggtttcacacagtgtgacttggttgttgtcctttaagtctattttaatctgtctgttccctctgtacacactcttttatcctccttgctacttattttttaaagaaatgaggttacttgttagaggttttacatccccatagtattgtttaatatgttcctctctcctctgaatttcctgtgaatttggtagttggacctacaggctcataacattcaagttttgttttattttattactattttttagctaggctacttcactggtgacattgagtccttccaagaggaggcacttagtatctgattgtccttttttgtgatgttagtactcattgatgtttaatgtgtagatcaagtcattccttatgggttgtaaaatgctggatactcttagttctatgatttctgtgacatttattggcttaaatgtttgatttttctccatatttaccagtttttgaagttttttttttttttttttttttttttgacagagtctcgttctatctcccaggctggagtgcagtggggtgatcttggctcactgcaacctctgcctccacagttcaagcgtttctcgtgccttagcttactgagtacctgggactacaggcgcacgccaccatgcgtgccatgtctggctaatttttgtatttttaatagagatggggtttcactgtgttgcccaggctggtctcaaactcctcacctcaagtgatccgtccccatcggcctcccaaagtgctgggattacaggcgtgagccacagcgcctggcctgtttttgaagttttgacttaacttattagtaccctttaacagtgactggtttgttttttggtttttgtaatttttaaaagtatgatatattttagcatatttactgtgttctgctgaagttactgaccctcagatcatcccccttgtggtagtgtgaaccttctcacattggtccctgtgtctgtttggcatgacctagtagtctctgatagctttctctctttctggtacaacaagatgttttggattcatcttacacatttcttgccctggatctggaatcagccattttcttcaaggagtcagtcctgctgctttttagtgggagatagtatttcagaactaaattttgggttcagaggtacatatccataaacaaacagctttttatagtaaaaacacatagagaaaatgcatacagtacaacaccaatgtagcctcaaaaaagaacacagcagagcaccgcaggggatccctttctgaacacagtcttctcccacttccctcagtcaccactcagtgtttatggtaatgacttcctcgattttctttcctgtttgatcatttaagacaaaatacgtccctaagcagtatcacttggttttgtctgttttgaattttatttaaatggatcatgcttcctgaatttttttttttgttgttgttgttcgagacagagtcctgctctgtcgcccaggctggagtgcagtggcgtgatttcagctcactgcaacctccgcctcccgggttcaagcacttcttctgcctcagcctccctagtagctgggattacagatgcccaacaccatgcctgactaatttttgtatttttagtagagacaggttttcaccatgttagccaggctggccttgaactcctgacctcgtgatctgcccgcctccgcctcccaaagtgctgggattaccagcatgagccaccgtgccaagcctcctggattcttttatatcttgcttctttcattcaacatgagattcatttgttttcattttctttgcaatatgatactccattggatgagtagaccacaatctatccattctgctattgatgtacagtcaagttgtttctagttttgtgctgttaaagaattgctgctaaccttgtatctgtctctggttgcacatgtgcatatgtttttgaagggtatatacatagaagtcgaattgctgggttagatgctatgcatgtcttctttccaatgtgtcatgccagctgatatgctcaccaacagcgtgtgagcattcctgttgcttcacattcttgcccacacctggaattgtcagactttaacatttctgttagtttgttgatggaaagtgatatctgactgtgactttggtttggtgtttctctgattaccagtgaggttaaacacttctccatatgtttgagtattggacttttctcctttatgacatttctattcaagttgtttcagtaagtctttggttcattttcccattgagttatcttttattgattcataggcatttttatatgtattgggtacaggttttgattggttgggtgtgttgcgaatttcttcttccactctggcttatcttcactttctttatggtgtcttttgatgaacacattcttttttttttttttaaacacaaatgctatttatttgtttgtttgtttatttatttttgagacggagtctcactctgtcacccaggctagagtgcagtggcatgatctgagctcactgtaacctctacctcccaggttcaagcgattctcctgcctcagcctcctgagtagtggggattacagacatgtgccaccatgcccggctaatttttttttttttttctaatggtagagacagggtttcaccatgttggccagcctggtctcgaactcctgacctcaagcaatctgcccaccttggcctcccaaagtgctgggattacaggcgtgagccaccacgcctggccacaagtacttttaaaattttattgtaggacgtcttcctccactttgttgggatatgtggtatatagtaaagatttcaaatatagtaattattattatatactatttagtattatatgcaacttatatatgatcttttaaaaaaagtcttatatctttgcctttctatttaaatttcctttaaaaaaaattgacaccaaagaaataatagtgtcacattgtttgcaccttactttttcacatacaattttattctggagctctttctacattatccatatgccagtcggcttcattctttgtcatggtggcatgatatatgtatatatttttttgagatggagttttgcttttgtcacccatgctggagtgcaatggcgtgatctcggctcactgctacctccgcctcctgggttcaagcgattctctggcctcagcctcccaagtatttgggattacaagtgcacaccaccatgcctggctaatttgtgtatttttagtagagacagggtttcaccatgttggcccggctggtcttgaattcctgaccttagctgatccatttgcctcggcctcccaaagtgctgagattgcaggcgtgagccactgtgcgcggccggcatggtatttcattgacagaattaaggttgtttttcttgtttaaaattgtgctgcaaaaaactctggtacataatcttgacataattttgcgagtacatctataaagcaaattctaaacatgggaacttctgggtcaaacaatttgattgttttaaatattaatagacaatatttactcccagttaattcatgtaaaatagcagttcatacagcctaaattaggaggtctaactggccatattcagagaaattatctggatatgaagtaattttttgttaggtctaacctgtattaatgacaatatgattacagtattttcaaaagattgacacttagccattctccatgtttcaaaggaataaatgctaatttagccaaataatagtttggagcaaattttgtgggagagcctgcgcttgtgtggagcaaatcccctgtcgtgttgtgaaatgggcgcggagaagcctgttctagtgactgtcgatgctctttgtgacagctaacgtgagggctctccggctcctgagtcatcctcctccccaaatgggggactgaccagtcttttggatctctgattttgttaaagcggaaatgtttttctctcccattccagtaattctttgagtatatctgtttttcttcagatgtttcgtgagcacctgtgttctggggaatagtgaacaccgtgaggaaggtggagtgttgactatgccatccactgtttgtcttcaagcagattactgtcgcgtaggggagttgtgatgtagtgtatttgtataacggtcttttaccataagtgggtattactccctccaggacatcatttaagtcaaggcagctgagacaatcacaaaagaccacgtattttatgattccattaatatgaacatcccaaatagggaactctatagaggcagaaagtaagatcagtgattgtttcaggcaggagagagtggggtgatagggaggtgatagctaaaagatacagggtttctttttgaggtaatcaaaatgttctaagattgaccatggtgctggttgcatatatctgtgaatatattaaaagccattaaattgtgtacttaaatgaattgcatggtatgtgaattatgtttcaatgaagctattaaaaaacattaaaaacaagcaaaaaatgcaggttttttttttttctcagttgtctcagtgaagttttccctgtaggtttcatagttactttaattgaatggatggtaaagagttgtctggtctgggctagatgcagtggctcgtgcctgtaatcccagcactttgacaggccaaggaaggtggattgcttgagcccaggagtttgtgaccagcctgggcaacatatggagactttgtctctacaaaaataaaataattagcagagcatggtggtggtgtggctgtagcactagctactcaagaggctgaggtgggatgatcacttgagcccaggagttcaaggctgcagtgaggtttgactgtgccactacattccagcctgggcaacagagcaagaccctgttgcttaaataaataaataaataaataaacaaataaatattcaagaattctcaggtctggatgtagggttagatgcaagttagatataagtgaaatagccggtttacttaccaatagacaggaaagtagtcttttgtgattcccttctccactaaatacaaatcagtgctactcaggggctctttaaagaaggagttggccaggtgtggtgactcacgcctgtaatcttagcactttgggaggttgaggcgggtggatcacctgaggtcaggagttcgagaccattcctgaccaacatggagaaaccctgtctctaaaaatacaaaatcagctgggcgtggtggcgcatgcctgtaatcccagctacttgggaggctgaggcaggagaatcgcttgaacccgggaggcggaggttgtagtgagccgagattgtgccattgcactccagcctgggcaacaagagcgaaactccgactacatgtaccctaaaacttaaagtataataataataaaattaaaaaaaaaaaaaagaacagcagcagtaaaaaataaataaagaaagaaataaataaataaatgaagaagtcaatcggtaccataagaaaggacaaaaaccaaaacaaacccaaagcaaaaccaaaaactccccacaaaccagcctcccctaacccttttaactcaaagcttcgtaatgtctctgaatttataattacgattttaaagagcactgtttctcatgccccatcccccaacccatttcgggagtaaaccttttctgtcagggtgaggagaaagtgggtaaaggacttcagcatttacagttgagttagtatttgttgttctccaaatgtgcaggattcagggccctctctttggtaggtgtgtgggaatctattggtatttattgggttcttaatgcctgcctgtccttgtgtaagacactctggcagtacccaggaatacatcaaccagctgagacaaacatgaagaataattattgtcctaataatagctaacatttattgattgcttactatgtgctaagcctctaaattttaaagttgttgtaaaagcaggaacaaagcctgtgacatgtaccattgtcttatttagctctcagaatcacagtggtagaggcactctcattattttacaggtgaggaaactgagattcagagggcttagatatctcgtccagggtcacatggctggtaaatggtagattcatacccagatcagcctaacagatctgaactttttcttgttgggggagaggggcaatggaatttttaacattttcattgcacaaataatgcaaattaggcaagaaaagcacaaagaagaaaataagaatcatccatatttctacacacagatttgctcatctttaatgtttctgtgtgtttccttcgtttgtgtttttatgccttctgatttatttttatatccagtcaatctctgtcagcccatcagtgaaggccattgctaattcattaaagaccttgggactgaggacatacaaatcataatcaggatatttcatggactggggattgtgggtgggggaaggatgcagatctgacaaattcatgctgtggtctaactcagagagggtcatcttgtcccaaagtgtcccctcagtctttctctccttccccaattaagactgtcttgtgaaataattaaaaatatctataaaggggcaaattttgcagcacatataattatagaaattatatagtacaatatggacaaatgcagggctaacagtaattcttagggctttcacagatgggcaaggttgggggtagggaccggctggaggcaaagagaaggcttcctgagacagaggggactggggctggctcccacccagatgaaaacctgcaaatctcagggagaaagcttcatgcactatgaaaaggtcacaagaacctccagtcctgggatgatgcaggcaagggaaaaatcaaatgggactttccccattgagtcatcaatcatttgcctggtgattggtgggagtcacctgtgtgttgtgcctgttcccagtgggaggttagagcttcatctctgaattaatatcaaaagaagagctgtctttacaaatcaatatgcttctcacaaggggatggcatatttagatgcagaggttggcatggcgaatcggatggtttgagggtagtggggcatctgggttaaaggccctgatgttctacagacttgggtttgaatcttagctgtgctactctcaagcgctgtcacctggcaagttgcttcatccctcattcgaggaagtggggccactggagcgtctacctcataggcttacaggtggttgggaggattaaatgagatgagcacatgcagcatttagtacagtgcctggcatagaataagtgctccatagggattagctaatgttttataattctaaaggggaggaaagatggatattaaggttggagaactatggatccttcccattgtattcacaaagaaaaccatgccatgaggcttttttggcaagtcactttaactttttgggcctaggttttcttaacagtgagatgctgggtggttctaaatgatctttcaaattctgcccatgactataatcctatgattctgcagttttaaagagcatcttaatgaatacaaagtacttgccagaatattttcttttttgattctccccacaacagtaatgggccgatgatgattcctgccattttcccagaccaggcagcagagctggcagacatttaatgactctccctcacaaggccatggagctcgtgagagagcataaggccaggttccctttacacacatgtggtgtgtaaaacggatgtacctcgattgggcttttgcccttgtcatggaactgagcccgaaggaggttcttagaggagcggggtgaggatttcaggagaggtgattcccaggggagcttcaggccaggactgtcatagtagagcagtaatttatgggcttctgacagcttgaaaaggtcatggtgttcttctttacttataaatgaaaacaaagtaatttgggggtcagggaaagacgaaagggcttgtgcagactgacctcaaaatccctggtggttatcatgtaaaaattcgatttgtttgatgcaattagccaaacctggacactttcttctccttctcaaagcaattgggattcagggcacaggataaaacagagttggggcagggggcagggaggaggcgctctggcaacagtgggaagtccagattgtttctattgtgcgtgctgatgtaattctttttctgcaagccctctgtggtttatcactttgccttcatgcacccttcttataaagcaattacagaatcacgggaaaataggcagtagcagtgtgaatcagtgccttttggaatggagaactgatacaaactgggcttcagtttgcagagggttgaggaatgtctaaggctcgtggatgggggaaggagaagtgacaagggatcacagatattgtatattgggcctctttggccaggccctccagtccccgaggcccttctatgctgcttactggctgcatgagggctgtggctgtggccgtcgccgtgtcagctgagcttgtaatttagatgttaccactgctcaactatgaaaagtcaggatcagcagctttgtcctagtgctgggagggaggtgtgggccctgggggaaccggcagctggatttagagtgtgaccgattccaggaacccaacagagctgcactagggccctcctcacctctgtgggtctgaatttggggtagggttccccaaaccaaactgtccagacttttctgtattgacattgagtctatagtcattagtgatcagggttccgattaatctgtgtccttattttagagtagcttttggcttagggttctggtgaccaactggtcacaaccataatttagcttctgaaaggccataagagtcagaatttgtctaacaggaatctccacagagatcctgctgcatttataattgggcatttcctctgcatttacttttgccccttgtctcctactccaagccacccccatgtgcttgaatgttgaaagttttgggttgccaggctcaacttaccagcatggttccatttctgtgattattactaactgcattgcatcatacacagagcaagtggttggaaaatagacctgcgtcctagcagtgggcaagagactcgactctcctgaatctcagtgtttttacttttaccatgggagttgtaaaatatccagcccagtataacattggctggatgtaaaacagcctagtatacaacatgggctttgtaaagtgaggtgctgttggaaagttgtttgtagtaaattgtattattacatactatacttatatagtaccaaacattggcccaaagagttttattttgttacttctttttgatctcatcaaccatgccatgcaaaaaaagaggcattttagaaaagagggaaatggaggctcatgtatgttgagtgacgtgtccaggattatttgctgaataaatgtcaaaatcagcagtacaactaggtgtctggaatcttagtccagtgcacctgtcattgtgtgctgggtgcaaggcattaaggctcactggttgtggtcctaagtgctcccctgcctttgcctgcttgccccccattcatttgttcattggctattatgagagcagctgtaagccaggccctgtgttaggaatgctgctaacgagggcaacagggctcttgctctcttggagcctattgtctagtaggggagacagacttaaaaaaatattatggcgtcaattgattctctttattttctgcatcctgtgaatgcacaagggcccagagtggagagagacttggtcccctcatcttgggctttgtcttactttctctttccttctagaaagttgtgagtcagttctttagatgggtgcgtcagggttctgccttcctgtatttgaggctttgtgtacttggtagttggagatgatggacgttgcatttgtgtgggctgaagagaattaaggaagaaacgaggcagggaagtttctccgaggaggcacattttgaacccgctgttaacgattatggcagtggccctttggaggcagctgcctctcttgctgactgtcatgacccaaccatggcaattttcactgagactgcaccttctgtttgtgatgttttagttcaggtttacattatctgagtagaactgggaatgacaaggctatgaggtcctgcctatgcccctctaacatcgtttccccaccagaagttttctcctgaggatgtattaaatgccgactacttccttggaattgctggatagcctttccagcgtgagcaatggggacagctccagaagagtggcacatcaggccagggaggattatcccagattttacagctgggtaggtggaaggcaggtctggcttgtccccacttccatcaaggagtagaggtgatttgcaaatttctctgtggtttggtttacttctttctcttggtcctttgattctttccgccttcgtctttcctttttctttctctttgcacctttctcccctgaaagatcacttggcagaatggttagaaagtactacctttgtggcttagttgatggtgcacaaaataactgaagaagaaaacataccttggctttgcagattgtatccttctggagagctgaattttccagagtgctaaagctgaattgtatccattgtaagcaacaaagctttttttttttttttttttaaaaattatctttaaagaatccattttaaaaggaaattctctgaaaatacattacacatttaactaccttcagaagcagccggctgagaacttaacccgacattctctccatcatgccgggtcactgttaggaacatccaagattctgctgtgctcgagtgatggtgccttcaggttgcttgcccctgcaggtggtggctccagagtcttagacttctctggttcttctttcttttcctgtcccatctggatcccccaaaccctgacccctcagactgttaggtattatttctgcttgtattatctctccctttctgatttgtgtgttaagaaacaagacagcaatttatttagaaatataagaacagcatctgccatgtagtggttcttattgtagatactgcaatagtttgcataaacgttcccatttaacgtccacacagatctgtgaggtgagcagcattgtgatccttattttacagaggcagacgctgagtggtagagaagatgaccacatattctccttgcctggaatacaggaaatgaattcaacattcattcattggggacttctattgtacttgttagatatcattagttaaaaataattgatgttgggggtgttgagcagtaacagaagagttaaaaaatagaatattctcatagtctggttatgtacagggcttcacaaatctttgtgttgttttacagcacttagcgggccttaagaatgagagaaacagtctgcaaattaaatcacaatgcagatgccatcttctcactgctactgtggggtttagctctacagatcagaggatggctgagtatagtaggcattttctttttgtcacgtactgatgtcacaatactttgtgttcttttatgtggtctaattgcttcaaacttgaatgtgctttcatttaaatccatttatgttgcttttgtcaaatgggaatgatttccatatgaatttgaatttacatactcataggcccttgagaccgtgtggatatagtgaacccaactcttggtagacttgggctctatttttgcctcagccactgacttgttgacttgctgaagggccttgaacagaaatgattacttttctggacttaacactcctcagctgtaaaatgaggtaggaaatctgatgtgatttctagttggggacattctagaagattccatattgtatctcaaatgactgttcagagacacagtctttaggtgctcactctagagaggactgtgataagcataaagcataataatgtaaaccctaacttacaagtttctttaaaagttgactcttaagggtattacacttgctcatattttaaatatttaaaaacaattaaaatttttttccttcatattcaccattggcttttcaagcatgcacagaagtggtgtgcagatcgtttcagatcaatttatcataaaatctaagttgataggtgttctcttaatgatgttcttatactgcctgttcaccttgaccctttagctttgagtagattagagagtgtaggggaaagatctttttcccttcaaatactcaaaggatcatgtgttctcttgagcagttctgcaaatccatataggacaacaggagaataaggatttaaagtgaaagatttcagtcggctgctgagctgctgggaggaagagatggtgtgtggtgctgacctgtccctgattgcccctcatagaaagcgaattggctctccccacgttggctcccatggaaaggactgatgggagagagagtgaggagagctggggatgcccttccagaatgctgaccagggcacgtgggagcagtggtgctggctggccttcaagatccctttctgcacatgggagctgaaccagtgagatacagcacctggatcaggcagcgcagaggagcagtgtggttctcctctgtggtgtgaaattaccctggaaccaccaagcagggttcaacagcactgatccctcccatcaacccaggtctaggtctcactccctcagcaccatctcgcagcttctagcacccctggaggctctgtgaacctctcaccctgcattccttgactcttcatgaactgtcggccttcctgtgtaagtgggtcaggcaccatgtgacctgctcactgccagtttcttctttgaatagatgtttatttcatggatcattttgaagattctccgtgggtgtgcaacatggttttagaatgttgggtaatttctcatgtgttctttgagatggatggcttctcagtcgtctttgcagtcagccactgtagacttgagtttctctcttgctgtcttcattttattgctccatatctgaggaaaaccatgtgaaaaatccctagacacataggagccctgagaagtggtggcagggaatgcttgggggacaaaacagattttagagttacgggtattttaattaaaaaaagagagacccagaattgtttttcacttaaatgagcaattatatctttaacttggggatggaaatatgttgtgaaatttgtttagtcagctccctctgaaataaataaaattacagtgatgatatcattcttgtttaaaatgtttgaaaaggtatcaagacaaagtgattaaggcctaactgtttgccaaattttctttaaagctccatttttggggtatttctatgccaaaaaacatcttaaactgatgaacatatagttctccgcacttgtattggctggtttttaattagatgactgttttaatagtggaagaaatacatttaggttgggcctaagccccagggtgccagatttcaatcccagaaaaaaatgttctctctgtttagtgctaatgtgcacttaaatagcacaggtgtgagtgcttttccctggccacggtcacacatgactttcccaagggctgattggttatggggttggcaggtttaaggtcaggttccccggcttgccctccacccagaggagccaggactctcaggctccctgtaagggaagaagttacccagatcatgagcctgttttgtctgggtcagactgacttgagccacagggagtgggtacagaagcctgggttgctgccgggtatgacccgaccttcgtcttgtacccactgtctccttccttttgtgagtcaccagctcacacatctacatgcctgtaaatgaactatgaggtatcgagtatgtgctacctaccgtggtggatgctgggaaggatgaaccatgcattttcctaaacccacacttcgaggtttacaaagataaaatctcatggctctttgccatccccttctcaagaaccttcactggctctctttttagttaggaaagaaggtccaaagcaaaagaaaggaaacacagggtgtgaaggctggactcctacctaacacacctgtccattccaaacaaactggccgtgcctcctcctcgatctcccacttgtgtgggtggctgtgtcatttctgtgcagcagctgatggtgaggtctttcacttggctccatggtgaatggggaaattctcccaggcactcttcctgcctcatctgtgaccgtttgtcttcccctggggctatagtttgagtactaggtggtattttcagtcttgtctttgccctgaggatgcagaagtactctatggctatcccactcctgacctatgcccaggccccctcttccctctgggggtggatcccacttgtacgggcaactcagtgcagtaccctggaaaatggcagacctggggtatctctggtctctgccactgtctcccagtgtgtgtggaggggctgtatgcttgaggcattattttactgtggcttacctccttggtgttttctccaacttggagcttgggtgagaatgctcagggcttggttgacacctcttcattgtcccagaggtgtaagggctgggtcggaagctatgccaccagaagccatgctgccctttccaccagatacttctgtttctcttctcgacatagaccaattccctttctttctttttctttttttgagacagagtctcgctctgttgcccaggctggactgcaattgcacaatctcagctcactgcaacctctgccttccaggttcaggcaattctcctgcctcaacctcccaagtagctgggattaaagacatgcaccaccatgcctggctaatctttgtaattttagtagagacagggttttaccatgatggccaggctggtctcaaactcctgacctcaagtgatctgcccgcctcggcctcccaaagtgctggggttacaggacatttccctttcttgtttgatttctcctggtatcttctttctttctctttggactttctttcctatctcatatttattttgcttggcattgtagtagaaagataacatgttaccactttaccctccagtctgaacttggaactgctgccatacactaaaaggatttactattcttaaggatttccttccatcctaaactacaaactttttcaggtcaggaactacattttattttgtgtattcccactgtaccttcacctgctgagtgcttaataaacccaggacagaattgaaggcaggctgagcctgtataggagagcagttgctttcaagttatgttaaaaactcctgggcgggagcattcaaaaattactcatagataacaaatccagctacctgcacgtgcatgaaagcagggaactagagccactttcagacagtgacttcagcttaggaaacaaaaggttactttaaagtaatgctgttttacttatgtttaaccaattctagttgacacacttattcagaatggccttactgccaattagtggagcatgttagtgaagtttgtaataaagtcctaatttccgtgactaatgaagctttacttgtgttcaacacaatccctgctctcagttatgaagttataaaaaaatgtgtttatgctgttgctgccgctgcccgtctgtctgcctccctgcctgcctgcacagtctttaagagcactgttgctctcctcctgttcctcacgcatttcaagcacaaatccctaccattcatcaaaggcatttgctggtggtggcaggggaaatgtcacagcactgctgccaccactgccaggtatctttttaaaatgtaatgtgtgtgtatgggtatgtgtgtgtgtatgacttccaccatttctacgggaatgttttttgattagaaaaagaaatagttgttacatttgcaatttgtaaccagaaccattttctttccaatgcagttgtaacagtgtaatgataagtagggtctttatccaaccctatgacaagtcacatgtacacacgccagacataggctccagattctgtaatatttagccctatacagtcaacagatttgattccctggcagtcagtctttgcattggaagagagagtaaaaattaggactggtgagttcaaaggttcttctaaggcctaagcctttgcagtaggagctttccatactagatatgttacctagagacttgtgttaaagtggaaaatcatgggctgggcatggtggctcacacctgtaatctcagcactttgggaggccaaggcgggcagatcatgaggtcaggagatggagaccatcctggctaacacagtgaaaccctgtctctactaaaaatacaaaaaattagctgggcgtggtggtgggtgcctatagtcccagctacttgggaggctgagggaggagaatggcgtgaacccgggaggcggagcttgcagtgagccaagatggcaccattgcactccagcctgggcaacagagtgagactctgtctcaaaaaaaaaaaaaaggtggaaaattatcatacaaatcatatttgtgtcaatctttgtgagggtgtcctaaactgtaagtgtgcctatatgtgtgttttaaaaccagaatgtctagtattgtaccacagaaaaaagacgttacaaaaatagaaattgtgtcagtaatttgcttttactgctatgaacaatcatatgcaattcctacaagtcatgctgtgtctagcctcacagccccctcactctccaggcctttctgccaaactcagcttctctgtgagcatgccctgatgagttcaaggggctcccttcttcgtgccaccacctttgagtccacaacaggatggctgttgaattgaacatgcacttagatttcgttaccgtttcctaggtctttttcaaatacattccgcttctctctttagttactttttagtctccctcaagggtagggattagattcttctttgttccctctcccatagcacagtttatgtggcttttgctgcgtgaggttaaagcacattggtggcttacatcttatccatttgtaaccacccagggaccagcacatggccttgtacccagtaaacaatcaatattttgttgattaatgatgcctaaagctggttaagttcttggactcaacattcttctgagctcaatgactatttgcattctagtcataaacaggaaaaggttctgttggcagccagggagatagtaaatacccctgactctcatacattgacttaatcagaaacaacaacttccccttttcaaatttgcattgtgaatgataatatcattttcaaatatgtaggattatgacattttaaagagaatataatgaaatagaatgaaggtgaaaacttgtaattatattagagcaaaactatgtttcccatagcttatatcctactatttctatgtagtgtatctggcgtggtcccatgaggatgccataaccaaatgattgaactagaaactgagaaagacttatcaaacatttagtgtcacgggcttgtgagatgaatcaatgctgggatttccagctatgttttttatggccctgtattttacaaagctgtggaaaatattgagcatttgaacaaggctctcagtcacagtcgtataacaagatgcaggatagggctttgcccgtggagttcagtgtgaaagtggctgtggttggtggaccttctgccctttcccctattgctctctggctgctttttctggtgggtgtgtgtgtgtgtgtgtgtgtgttttttttttttttttttttttctgaggtacttcccagggaacagagaaataagttgacaaaaggcacatataaaagagagatctaggactttctaaacctgaggcccacagccctttcatttaatgctatattggcacatgtcttttttctcttcaaatcattctcaatcatggtccatttctcaccaccccctcctcccaacttgttatcagttgcgcctgaccttttgggaaggaagaatctttaaaccctgtttgcatctcagcagacgggaatgcctgcctacttctcatctagggctcctttctctgcctttagaaattcttttttattcttgatacacactgctcagattatttattaatttaaaaattaacatacagtaaaaatcggggtgtgtgcacgtgtatacagttctgtgagctttaacatataaattgttgtatctcttaccacaattaagataacagaacagttttgtcccccgcaaaacttatcctgcctcttgtagtcctattcttcctttaccccagcccatggcaaccactgatctgttctctattgctatagttttgtcatttccagaatgtcatgtaaatggaatcactcagcataatgcctttgatattcatccatgtttaggagtgtggagaaatcgttcttttttattgctgagtaatattacatttatggatatagtacagtttatccatttatctgttgaaggaaatttgggttatttccagtttctggtgattataaaaaggtgctagaaacgtacaggtttttgtatgaatatagatgttcactagcgtaaatacctaggagtggaattgtatatttaacattataagaagctaactgctttctaaaatggctgtaccattttgtattcccaccagaagtgtatgagagctatagttgcttcacattcttgccaacacttaatcgtgtcagtactttttattttagcttctgtaataggtgcgtagtagtatctcattttggttttaatttttatttcctaatggataataatgttatgttatttcatgcgcttatttgccacctgtttattattattttggtgacttggtgaagtgactatttctgtcttttgggtttctttttactgttcaatttgaaaagtgccccatatatcctggatccaggtcttttatcagatatgtgatttgcaaatattttctctcagtctatagcttgtctttctattatctctcttgctctcttttttttttttaatttttttttgagacagagtcttgctctgttgccaggctggagtgcagcgatgtgatcttggctcactgcaacttctgcctcctgggttcaagtgattctcctgcctcagcctcctgagtagctggggctacaggcatgtaccaccatgtctggctaatttttgtatttttagtagagatggggttttaccatgttggccaagctggtcttgaactcctgaccttaagtgatcagctcaccttggcctcccaaagtgctgggattacaggcatgagccaccatgcccagctgtctttctgttctctaagtgtgttttgcagagcaaaagttttaaattttgatgacatccagttacttggtttttccttttatgagttatacttttgatgtcgtatctaagaaatcttcgcccaactacagatcataaagattttctccagtttttttcctagaagttttatagttttacattaagatctgtggtctatggccaggcgtggtggctcaccgctgtaatcccagcacttgggagtccgaggagggcgggtcacctgaggtcgggagtttgagaccagcctgaccaacatggagaaaccccatctctacaaaaaatacaaaattagccgggtgtggtggtgcatgcttgtaatcccagctacttgggaggctggggcaggagaattgcttgaacccgggaggtggaggttgcagtgagccgagattgcgccattgcactccagcctgggcgacaagagcgaaactctgtctcaaaaaaaaagaaaaaaagaaagatctgtgttctacttagatttaatttttgtagaaaaagtatgaagtttaggttgaagtgcgttttcttttgcatatgaatgttcagtgtttcaactctatttgttgaaaagcctatcctttctcaactgaattatctgtacatttgtcaaaaatcacttggccatacttgactctatttccagactctattctgttggtctttgtgtctgtcccttcaccagcactatactgttttgattactacagatttattgtaagtcataaagcggggtgacttgaattctccagtttcttatttctcaaatttttgtcgttcattttaattcctttgtcttttcacataaatttcagattcagcttgctgacttctaccaaaaaagcctgctgtgattttgattgcactgaatctatagatcgatttggggagaattgatatttcaatcatattgttttctaattcctgaacatgatatccttctctatttattaaggtcagcttctgttgagttgatcatgtgcttttgacctttattctattaatatgatgtattacactgatttttgtttgaacacaatctcacgttcttcatataaatcccacttagtcatggtcaaaatgtttatatgtttatatactgcattcagtttgctagcattttgttgatgatttttatgtctatattcataagagatgttggtatgtagttttctttgtgatatctttgtgtggtttttggtatcaggtaatactggccttatagtattccctcctctcctggtttttgtagaagtgtttatgaaggattgatgtgaattctttttttgaacatttggtagaattcaccagttaagccatatgggtttggccttttctttgtgagaagttttttgattactaattcaatctcttcagttattataggcctgttccaattttccatttcttctagagtcagtttcagtagtagttatttatttatttttcctgagaacttgtccatttcatgtaggctatctaatttgttgactgcatttcttttagaatgaattctcttagttttcatccctctgagattgttctttcacctgcatttcaaaaggatgcttcttgctaggtaaaggattatagattgacagctcttttctttcagcactttatcagaattgttcctcttctttctgacctccatggtttcttctgagaaatctgtaataattcaaatcattcttctctatgctgtatgttgttttcctctggctattttcaagatttttttcattgtctttagtttttagcaatttgtttatgatctttctaggtattgatttctttgagataatcctgctggcagtctgctgagcttcttgcagtggtaagtttaggtcttttgctaaatataggaagttttcagccagtatttcttcaagtatttttcctacacaacaccgtttcttctcttcttctggaactctagttccagtattttagtattttctttttagtattttcttacagatccctgagcctctgcttatttttataatctttttttctcttcatgttttacattagataatctctattaatctaaattcacattcactcactattcctgctattacctccagtctgcaattgaagctatccagtgacattttaagttttattgtatctttattttcaaaatttttgtttttgctatcattccatttattttaagagtatttagccttacttcttggagcatggttaaaataggtactttaaattatttgtttgataattctggtatctatgctatcttggggttggtgtcttttgattgtctttttccttgcaaattgagagttttccagtttttcgtatgttgagtaattttggagtatgttctagacatcttgaatatttttattctgagtcttatttattatggagactgtttatttccttaagcagataatcgacctggttgcaaattctgacctgacttctctgggctatgtttctgactttggttcagttttcaaagcctttacagtgtcattttagtctgtttcttttgtgtgcaatctattgttcagtctgggacctgggcaatgatatcctaaagtgaaaatctgaaggccactggcatacttttagggtcggatccacaacgaagagcttaaatgtgagcccacatgttaatatgcccctttgtgatgtaactctcttgagcttccttggttccctgatgtcctctttttgctgtcctccagctagaaagcgaggaatttagttcctctgttctcctgcattactttacgtgactgtgtccaaggccaagcgcttgaaggtcagggagaaaaagaagcaatggaaattcgccccttattctgggactacaactcttgtgagaatcattcttctttctcagagttttaggtacctgctccgcctgtgctgctgcttcttggtactgagggattgtctgggggctggggtgggagggattggaaaaaaacaaagcaatacagataatttctctgaacattaggagttccttttttttttttttttttttcctttgttggccagaaaatgagggttctcttcaggttatttctgtccatacccagctagcacttttggatggtgagctgcctttgaatccagactgggtgatactggagggggaaaacagtggaaaattctctgctggtttggtgatactctgagttctagtctcatttctcaatctatttgttgttatttacttttcagagtcctctgattcttcatgttttctgtctagcttatatatttgcatttggtaggaaagatagggtgggagttcttactccatcttgcctggaactggagcctctatattagtctgtttatttattaatcaaatcctgcatagagtgggatttaccaagcctggtttcttgagatcctaggatgtattcataatatgtatcatggaattctcaaataatgcttatgataaaataagcttaaattttccttactttaaagcagaggctggcaaatgttttctgcacaggaccaaatagtaaatattttagtcttgtggtctcatagtctctgtcataacttcttaactctgctgtcatagtgtaaaagcaaccacgaacaatacataactagtaaagatagctatggtccaattaaactattgattgacactgaaatttgaatttcttatacttttcatgtgtcatgaattattatttttttgatttcttacaaccgtttagtaggtagtgggccagatttcgcccatgggccaaaatttactgaccactaatttatgtcatggatggctctatggccctgatcaacaactcctcttgattgaaattttctgtctgttctggagaaacaaagataggaaagcaagagaagttctagaaatcctatggaatgcttatggatacaacctgtaagccaaagtagcttctcagtcttcttttgaactccttaggtagggcacagagagagctcatagatgttttatcttaattcatctccatattactttgtaaggtaaatgctttcatcttcattttatggatcaagaaactgaggcacagagaggactgctagcatgtctcaagtcatgactaaactgggatttgtatccaggcctgtccagcaccaaagctgttgctcttcacactctaggatggcacaaatctcctttttttctgttttatcttgtctctgtacaaaaaagccatgtcaataatggtataggtcattgaaagccttatactttaagactgctgcgctctggtctggacttactcatgaattattgcataactctgggcaaacctcttcatttctcaaggtcttagtctccatgcctataaaataggggattggatccctattttacgtttatttctctgtcatggtagctgtgagagttttgtcagtgagcatcctaatcacagacagcgactttggaaagagatggtacaccttgtcattggagggctgtggggagttgtagagaacaagcttcatcctgggaccatgtgtgatggctgttgacatagagctttgtagctgtcaaggaaaatagagtaaacacactacttccttttgatcttcagtttttcgcagtatgctcctagatcatacttctcttgatttagtgatagccttataaattattgccactttctttgaacccttattggtataagtcggtgataaatgcttgagaaactgggccttgatgaagtactggtatacctcgtttggaatttgttctgaaaatggtaaagcatttcttaaaggctttgttataatatgaaaatgttcattgctttttttgttcattctataatttttttatcccttttacattgcatgtcttgattacatagttgatttgatattctctgaaatgtgatggaaaagaaaatgtaaacacaaaattaaaaagcagaggaatgaagacacattttgtgtgctgcttcgtgccagatagttttgtacatatccttgtacaaagtagtggtctcatttttaccacagtgagtaagcccctggtctctacctttaaggaacttagagtttgataggcttagtggttctcaactggcattaccctctcttgagagtatttagaaatctgtggagcagctgcaattgtcacaaatattgagggatgctgttggaatttagtgtgtgggattttatcacaatgaagaattatcccaccaaaaatgtttatagatctccttttgggaaacactgtgctgagtaaaatagtagtaatgataataaaaacacttgcatattgagcactgccattgtgttcagagaactctacagatacagtccatattctctgatatgtagctctaaattcagaaatctctaaaattgaagtgggttttttattaatccatttggtaaaatgtgacctgaattgatgtgagaacttttatttttttaaagctgagaactgtattttttatagctgtattgaagtatagtttacatatcaaaaaattcacctgttttaagtgtacaatttggtgatttttagtaaatttaaaaagctatatgtaactcttaccacaatccagttttataacattttcataaatgcctccccccccaaattctcttgaacctgtgtgagatgatttccagatgtttcactgaagaaatatggaagtgtttgattatggagtgctgctccagatccttcctgaatgctaggtattcattcattttgaattccaaatatacccggctgcagaagtttcttgtaagagattgtggactgtatgaacacatcccatccccacaataaccctggaaagtagatgctattattgttccttgttttgcagttcaggaaactgaggcatagcctttatacaaggctgaatggaatgtcacaagaaagtccagtgggggtccagaagagaaaatctgtgaccacttggcctgtaaccgaatttgcctatatttaaagatggaggaaataatctttttgttttgttttgtttttttagttgatactaaaggatatgcataaagtatttaaagtttaactcaagatccagtggatatgtgtggaccctcactacctagtctataactcaccacacctttcactcctttgggtgtccatccttatcctctgtccccctcccacagggatgaccactgtctaaaatttgtgcttatcaggccaggcacggtggctcacacccgtaatgccagcactgtgggaggccaaggcggatggatcacctgaggtcaggagttcaagaccaacctggctgacatgatgaaaccccatctctactaaaaatacagaaagtaaccaggcgtggtcgtgggcgcctgtagtcccagctacttgggaggctgaggcaggagaatcacttgaacccgggaggcagaggttgaagtgagctgagattgcaccactgcactccagcctgggtgacagcctgggtgagggcgagactctgtctcaaaaaaaaaaaaaaaaaaaaagtgcttatctttctttgattctctttagttttaccacatatgttttaattcctcagcaacactttaattttgcatatttttgaagtttatataaatggaattatactgagtatattcttctgtaacttagttttccctcaataatacttcttagatttatcggtaattcattagttttcattgttcttttgtagaatataccatgatctatctatactttgactgttggtggacatttgtgatgttttctttttttctaaaaagagataattcaaatggtgctatattgaatagtcctcctgaatttttcttgatacatatgtgctaaggattatgtaggcatgaaatttcagggtcctattgtgggtacatcttcagctttattggatgatgcctagttgttttccaaggggttatataaatttatactccctccaataatttatagatgctaaaatttttccaatctaatggttctaaaatgatatatcattctgacttgaatatgtatttctgtgatgactaatgagattgagcatcttttaatatagccatttagttttccctttttgtgaagtgtccgttgagtcttatgtccatttttctactggtttgtctttttttttgagacagtcttgctctgttgccgaggctggagtgcaatggcataatctcagctcatttcaaccactgcctcctgggttcaaatgattctcctgcctcagcctcctgagtagctgggattacaggtagttgccaccatacctggctaatttttgtatttttagtagatacagggtttccccatgttggccaggctggtctcgaactcctgacctcaagtgatctgcccaccccggcctcccaaagtgctgggatttgctgggttgtcttttgaatactcatttattaaacttctttatgtgctctggatactgatcctttgttgtttatacatgatagaaatgttttttccttctttgtggcttgtccttttgatctctttttggtgtctttggataaacagaagttcttaattttaatgtagctaatttatcattttccattaggagtttttttctttagtttttaaattagcgtttatggagtactttgtatatcctagacacctttctaagcaccttataaatatccattaatccttataacattagaggcaagtactgttgctatttccattttataggtaaggaaactgaggcacagaatgttaagtgactttttcaaggtcactcaggtagtaaatggtagagccaggacttgaaccaaagctgtttaaggaattcttaagaaaaccttttctaccatgataagatgtgcagatattcttatatgtcctctgaaacttttttgtttgtttgtttttgttttttgcctttagcatgtaggtcttcagttgctctctaatagatttttgtgtgtggtatgaggtaggggcccagtttaatttttttccatgtggattatcagtgtttcagcacagattacttaaagtctaaccctttccccacctctataatacatgccttataacaaatcaaatttccttatatgctcatatctatttctgggttcattgttttagtggtgaatttgtctctgtgtcagcactgtactgtattaattagtatgcctttataataattcttgatatcagtaagtcaagtccttccatcttgttctactttatcagcagattcttggaaagtttcctactctttaaaagcaagattgcaggataatttttgactgtaacacacacacacacacacgtacacacatgcatacacacattggggctttggaagatgatttgtcattgctattgtattgacttgtttcctgaaaatttagcagatataatttcatttgagtggcttgagctctatttatctgcatggccaaaatctcaaacacacatgatgtagtggcttgtagaaagcttttgattcttgttaaatggagaggagggagaaaggaaaggaaaatcagtctggtagattactagtgtcttctgtttaagttcagttgcgctgataattccagaaaatatactgaggaacttcaaaaggcatgtggaaccttgtgtagtatgatttatactaatcatagtatgtgtgtatgattgtataaggtgaaaaacaagataatgcatcttctatgattaagttgccttatttatcaagtaagaggtaactgtaccccgttggtcttaaatagctgatatgtggtttggtacttaatactgtctattggaggaattgaaatagaatacccagagatacccagagtctccactgggaatacttctgctccccaaatgtgatatcagagtaatatcaagtagaatgtggagtacacccacctattgaggcacaaactgccctctcccatgaccctttctctgtagaaagtattacttatactgtaaatagcagtcaaatttcaagtaacatcagttctctacatcttagccttttccaatctgggtggccaaagtgaagaatgattaggtactgaaaatttataaatgccgtgtctgagaatttctagacaatgggaagacacctccctaaggaaacctgtcagtctgaagtcttcccagctttcagagcatagcaagttcttaccatagcctggagaatatgtgatctgccagtgcctgctgccccttcacctcttactgacatcccccttctctctgcaagagtgactgccttgctgttcttcagaatgccaggcaccctttcaccccaagcatttgctctcctcttccttctgcctgtatgtgcttccctggatgggtgtttggtttactcctgattacctgggtctctgctcgaatgtcatcttctcagagaggtcctccctgaccaccctctcccataatagcacccacattcatctctgccagccctccctgagttcctacatggcacctgacacatattcactgtctgccctccctcgcttcccctccccacacactaggaagtcacttcctagaggaccagggactttgtctttttaactgctgtttcttccacacatgtgccacagcgtggcacatgggagccgcttgagagctgtttgctgagtgaaggaagctgttggctgaaaggagggcagagagggcctctggagcaggcccgtgccccaccagccctccccgagagctcctgcggcagcttgcttgcctctctgtcggaaacttgcaccatttaggcagctcttccatgagtattcttccattacatgctaagcaccttgagacaaaggtctgtcttaagttctttccctactgtcacccctgctgttttccttcagggctcggactgagcctggcacgctatttgctcatgctatttgtcttcagctatctgttaagaaggcatgcgggtagcagtcatcctccccaaggggagcagcagattaggcagcactgtaattccttaagcaaactcctggcccaactagcatttccattctgaattcctctatgtactgtctttgagtcttatggagacgataatcttggtgagaaaagggaccagccatattcactgcaggatctcccgtggatgcatagcatggtgccagaggcatggtaccccaactcagcacacactcactaataattcatcgctaaagttcactttggcctatgtgaaatttattattgttgatgtccaacattacactaaaattataagaatttatgtacaatctctgtacaggatctgtagggagcacacagtttttcattatgaaagaggcttcgttgctcatctcagctcctgtgctgttgaacaaaaggtgttagacacacacccattccctacttggggtattcacaaatgtcagacctcaaagtctcttctgagtaaattactgcctttgcttcatttaaaggtgcccttgtgaccttaaagaattcagccacctttcaaaatagagctgtatttctactcccacctcaccagagggtgagcctcaagtgtttgattacagaggagcgagaacttactctctaggattaatgtaataagagatgaagagcagacaacatagccactcaccgaaaaccatgtattcataaaaaataagccaagcccaaagtctggatttcagaatattttcattaataaatactttattgcaatgaacagcttaattgcttaatctctgtgtagttatggacatgtcttgtatacactgcctgggctgtatacactgtgtacactgctggctggatgggcttaggcagaagcaagggtcaaggcttttgccagtcttgcaaggcaggcttgcatcaggaattcctagagactgaggagttctcattgtaggtttctttctgactgaaagaagcatggtgcgggcagagcactaggctgcgggggttagaagaccttgcctcacgactctaaataagtcgtttaacctaattgagcctcagggtcctcccctaatggagacggacacatcaaggggctgtttggatcaaatgagatcatgtgactgtttgtggataatgaagttctgtggaaagaagatgggagggtagcattgcatactgtcttggtaagacctcagacttgcttagctgcagctcttcaccctcttacggacctgcagctgagcagctaagcgtgattggaaatgtcattcagctacgatgactggtattctttaaaatgaccactgacttcaagcaagaacttcacaccactggcattgatgctacattcaggaccattctttctcatttctagacagtgatttcatatattttcctctctcccgaaacctccagcaccttccagcctcactctcggccgatggctttacttcccatttccctgagaaaattcaagccgccaggagagaacttctcaaaagcgcccactgccacatccccctgcctactcttctgtccacagatactgctgcctcccctgttagcatgggtgaccatacacactccttgctaaggccagcttctttactcgcacaccaggttgcatccagccttgcctgttgaagtccatggcagtgccgttctcctgcctctctcctgctgtcagctttttcttctagactggatcttcccagtcaatacacacaaacatactcttgttaatatctcccacttagataaccctttattgattccttttcagtcattagctactaccccatttctcttttcctgtatggctaaatactttaaattattttccatattccctgctgcctattcctcctctcatattcctcttgaaactcatcgtcatcaggcttttgctccctccagcctaccaaatctgctgtcatcaagatcacaactggtcttcctgctgttaaatccagtggtcagtttccatccctcactgtacttgattccacatctagcatcctccctcgttaatgcactttcttctcatcttctcatggctcccaggataccacactttcctggtgttccccccacctcactgttgcttcctttcagtcttctttcctgattcttcctggccatttgttgtcttgttggagtgcctggaggagtctttaggccttctcctcctatttctatcagcactcgctccctcaatgatcttacccagtctggagtttcaaatccatccagaagctaacatctcatgcatctccagttgaggcctcccttccacactgcaagttctcacatccctctgcccttggagaggcacgccctgtcctacttaccctcccaagtgcttaccactgctcactggcttaggcgtacgtgttggccaggggttgtcatctctgtgctctccactagaatgtgggctccacaatggaggactccgtttactgttgtatccatagcacttagaagagtgcctggcacatagtaggtacttattcaatattttgttaaaggagtgaatgtgttaggtctccatatacagtggagattctagtaattcgctgtctcaggtcctgtctcaactctccctactagtattagggtgccctagcctttcagagatggtctttgtcttggaactcttactaaatctatttgataaaatatgattgtttctctagaactctgttgaattgataccaggcattcaactatgcagtattaaatgtattctttatcattgatttggggaggctatttgggatagtagaaagatctttgactttagagccagatacttctgagtttaaattcttgctctgctgctaaatagctacagagccttagtggaaacatacagtcttaggccttagttttctcatttgtaaagtgaaagatttggttcatagggctcttgggagaaattacatgctgaatatatgaaatgcatctagcataatctctggcatataacaggcattctatagtggtaactatgatgattatggtccttagctatacggataatcttaggattgcttgcaattcaaaactttttggaaaaaaaaatgtaattattccttttaaatactggccgttggtctttggttcagaacataattgtctaatttaacattgtttctgtggtaaaagttagatttgatttacatttcaacttacagagcctttttcaggaatttattctgcttcaaagatcaaggacttcctttcagtgaaacttaacgacagtgcttaggaatggaatgctctggaaggattgtcttctaattaatgagaaaggagcttattttgtgggggaggttctaaaatgcctttatatgtgcactgagcataattccaaagttatacagtaaacactccatgaatacttggttacttgtttttgctccagagatacttaactgaactcctctattgattgccctgaggtatagctatggaaagtagaggtgatgctactaaatacaaattcaacataggcttacaaatatcttagaggagcttttctggctttgaactgtaaacgtcaacggagctatattcatgataattatatcttgattgtatcttcttagggaaaggattgtcaatggtcctagctcaaaggaaattgaacaaagaagttaagatagcacatgcaaacatacacatccgtgtgtgcccaaacatacggactctctcacactgttaaataatgcatgagcaaaatattaagtgcaaggtacagtctaacgcatatcactctgcagtatgtggtaagtgccaaatgaacaggataaatttaagtactgtaatttcaaagaacgagtcattagcaaaggctaaaaatggtcaaggaaggcttcctggaaaaagtgagcttggagctgggcattgacagatgagtcacactgtgcctcatgatgcagtgtgcagaactggtccagccagggtcaagtggatggctctcaggccagtccacaccctcctctgggggaactagggcaagtctgctggctgcctcagtccttccctgtgaatgcagcccattattcctgaatcacatccttgtctgccattggtgattttgggtgcttcgtgggctttgggtcaaggcagggggttcttaagtggggagggcaggaaagggagtttaggatcacgtttgttgtggggaagtatctgaatgattcatttgctgtgcgtgtctgaatctttctttggagatgagttgatgagggcaagctttggctgtggatttctctctggtgatgtgatttgatttgatggataattatggaagagaaggaaaaggagattcaggattcagacacagaaaaacctgacaaacgattcacaaacacttttctccacccacagaaacccaaatacttagactgtgccttgtggcaggggcagtagggtggctggagagagctgtcacatgcactcacttgcccagctccatggattgtttacttggcagccatagctgtcgatagttggttatacgaatggggtgtgtttggccaggatcccgtagtctcacttaggcctttcataatagtcatgacaggttctctgtggtcagggaggctgggatagaggtgggggagctggaaaaggatgggccacctctgtcctgtccatagggtgacagccacagttctccataggaaccaaacctgcaggtgtgtcagttaaccatgaaccctaagcaggaaaataatatcgccttttttagacctccgcaatttgtgtctctgcataagacaatgagttttattgcaaaggcctagttacaaaaaagcgtgtcctgtgtgacgatgactgtgactgtcccaagctgttctgcttcggtaggacagtccaaaccagaaccaggaccaggcttgcttgacaaatcctctctaaaggaacaggtggtaggaaacttctgaccctcagcgattggactcaaaacattctctggaagtgccttagacattaccctggttttacaaatgagaaaactaccactctgtccatggactgatttgtttgaggttaccaaactcttcttgcctgtctctttctctctttacatgctgttaatttgttgtggactgccagatttacatctcttcccctgacctgttgctattctagacttgtatgtttcaaaagcatctcaagcttgccatgtgcaaaatggaatccagctctttctccaagcctggccactcccagcccttccagtcccagtggatggtgtcaagtccacctagggtgctgaccccacaagttgagcctgagaatgtcttggatttctttttatccctctaccatcgaaatcatcaacttttttggccctctctgcctctggtttgtttgtttgtttgtttatttatttatttatttatttatttatttatttatgttttagagattgggtctcattctgtcacccaggctggaatgcagtggcacgatcttggctcactgcagtctcgacctcctaggctcaagcgattctcccacctcagcctcctgagtagctgggactacaggcatgtgccaccatgcccagctaatttttgtattttttatagagacaaggcttcaccgtgttgcccaggctggtctcgaactcataagctgaagtgatccacccgcattggcctctcaaagtgctgggattacaggcgtgagccacagtgcccagccttctggatttattttgaacctctccacttatttctctttgtctctgctaccacctccctgatctaaaccaccaccatcctttgtgcctccagtctcttctccacacagtctccagagtggccttttaaaaacaaagctgagcatgttccccgtctcaacacccgtttatagaccatctttatatgaacagaactcaggctttgtgctggcgtccacaggctgtgtgtggtccctgtctctctcctgcaaccctgtccatcttccctcttgcccatggcacactggccatatcagcatcatttcagtgtcctttgaatgataaatatttgttgccacagagctttcaaacatagttttccacctgaaaacttctttttatccattagtttgtagcttagatgtcgcctctgttaggccttcatggattcctccatctaaaaagtcctcccatatttttctctatcattatggccagcttgttttcttgacagcatcatttatgattgtttattaattgatctggttattctctgtgccaactgctggcaggaaagggctgacatttgttttgcacccccgtaggagcgtccttttattcccagctggcttcctattactgtaccttcccctcactcctccacacttgtctccttgctgttcctcagccgtgccaggcttgctgtgccctggggcctttgtacttgctcggccttcttttaagaactttttttaaatactggtatctatgtggctgactctcattttctttagatctttactcagagtcaccttttcagtgacgctagctctggtcccagtgtctaaaactgcacctgcccctgacactccatactgaacttcttggctttatttttctcctttgtgcttctccctatccaccatatggcacattttacttatgccatttattgtctgtctccccagctagaatgacatctccatgagggcaaggagtttcttctgttctttcactgttgtatgtccagtatctcgaatagctctgggcacacaggcactctatacatggttgaatgaatgaatgaatgaatgatttcatgaacaaagtgtgtccagtcactggcacatagtgggctctccttatcctttttattgtggtgagatacagtgtatcattttaacaaattttaagagcacagttcaatgacattacatttgtattgttgtgtaaccatcaccactgtctgctccctacacttttctgaaatgaaggagtcgaggaataagcaagtaattgagtgagggactcttggcaaagcagttgtacagtgtcgatctcttgacttggaggcccagggggtcctttccattgcactgtgctctggaggaggaagggcaagaagatgagtctgagccccatctcagggtgctcgatgcatgcagcaaggaagctcagtgtttccacacgtttcaggttgcctctgttctaaatgacgagggtgctgccctgtctccccttccttctgccgtgcacacacctgctcacacaggcaccatgtgtacacatcccttcctctgcactggaggaagcacctttgcaatatttccagctcatgggatggtgtgaaagggatatgctcattctcctttgaacccttctcaccggatctccatcatgaggggactctctctgcctcccttggtgttctcatcagcacctcgtcaggtgagtattccattgatggcagggaagtgtttatttttaattctaaagtaaatcagattacatagaacacaaaatgttgtgttggatcaaaaccattgactatgaaattctcccagatggatgaaaggcgggggcttgttttcagcccttaaccacttcttctcacaagctggttaaattctacgagaagtccatccttgcgagcacttcgccatcacaggcccttcccttggggagctgtggcatctcccccacccccagcacactcacaccccccagcagacgggaacattctcatgctcactgtcactcacgtgtgtgctgtcccacgtgttctcactcatatgcactaattacacacacacacccaacctgcaggtttgcttttgacacgccaggaattacatgggagcagccagagagcccaaagtaagccttgagatgactttaacccctgtgaagcccacagggtaagacccctgctcagaccaacgtgacaggctcctgctcatcacgtgagttgccctggattcctcgatgacgttgcaatggtgtcttctcaacaaaacctcattgaggtcttgagacaggggcgcaggccaggcacatctaagtgttcgaggtcttctttgttgaattccacagcattatgtgtgcctccaggatgtgcctggcacatggttggcctggggtgtttggagaggactgggtgtaggccggaccctagaggagcttataggacagtgctggcggcagaggtgcccatacctgcgtcctgcatgatgttgcgagcgtgatacccgatctgtgcacaggaagctgcgggagcttggaggaaaagagaaccttgctctgtgggatgagaatgcaggtcaaggtcaggggagagttcagagaggcacttgccaacctgaaggtgtggagatgctgccgtgcatgggcaggaaggggagtggtggggcagagaagtcagggtgtggggtgggggcatggttccaggaagcttcctattttgtcttgtcagcagtagataggaactggattgaatcgggattatgctcacttctattgttagctctgatcatttgttgtttgacttcctgctttcccactagagatacgagtacatggcaagagatttctgaattcccacaccacaggtgtggccatggtgcacaacattgcaaggtccagggtcagtcgtcattttgctggtaaggaaggcataaactaacagcccagtagacaaatagcagtgtcccttcatgcggttgttactttgtgagagtaaagacatacaccaattggtttaatgtattcgggtagattttctactagtcgtgtccgtttaaaaaaatcaccagtcagttctctttatcggaaaaggtattagacacctgtagttgagcatgtgctgagatctggtgttttgttaattgcagtatttgatgatactggcaaaagtcactaagagaatcctcaaaacatcttgttagaaatgggaagaatattccttgactggcaaattttttttctgttcttaaaattaagcttataaatggctggaaaaattagttattttttccaggctttagttgggaagagatttttgtgtctggtgggaacgttccctctctccgttgatgcttgagaaagctacaagacgctgatggtgttggtggcagctttgccttatcggctgtcctggatgtcttggcctcagataagacacttaacccacagtgggagcatgctgctgcttttcaactgggaaacgttaccgtctgtttccatcacagtggcccatgacgaagttgaaagatgcctctgacatttgttatattataaaaatgccaagaatctcctaaagtttgactcataggtcagtttgctttcttaaaacaaaatggcaaccaatgaaagttttctggtgagtgttatcctccgaaattttaagtggatttaaataaagttcagtccgtggatgagaggattctcagtgaaattttcagtgtgcagaattactcgaggccattgagcagagtcattgctttctgtaatgttttcccataagaacacaagaatctccatcctccatcagactaatagtttttccagtccagcattttgccactgagaatggaattaagggagttgctgtgggaagaccccataacccttccagccatcacctcaaaaacgtaggagtgtgctttaaatatgtgtaactccccttaataagctattatggagcccttattcatatgattcttgaatttgtctaaattgcatttgcagcagtttttattttgggctgttaccatctggtggaacgtggcgggcagtctgaacagcagccagtcaggatttaccccatatccccaccaaaggatctcattcctttatccattcaattttcatgctgattcatttgattcactaagtagaattgataaatgcctacattgttcacctatgtgttgatttttggctctttgtaagggcattgctttaaatcatgttaccagtcagttcttattcttcctcttaatatgtaagaagtgcagcttcttcatattggttccaaaggcacaactcaccatattttctctttcattttctacaggggcaatcggagctgtagagcctctggttggtaacacccattgtagaatagtggggtgtgggcctcagagagactgagattatcgctggccccattgtttactggccatgtggtctggagtgctttgctgcatctccctgggcttggcttcctcatctgcgaggtgggggtaataggtggcttctcataaaattggactcactcagactccctcagttgcaagtgatagcccaatttcagtggacttctgtgaaaggtgcagctgacctcaggtggtgctcgattccagggggtgctggggaggagctgtctctttcttcatctctcagcaggggttgtctctgtttggctttctcctaggatgtggtggcgaaatagccactggcagccctggatttatatcttaccagtgtggcaacccagccaaaagagacagcatttttctaatagaaaaattagagaaatcccatggaggtatctaagtgcttggcatggggcacagtctgttctttcctgttgcggccaagggaggagagttttctggccctgcagtggccagaagatggagtcacttttacccaaaccacatggggaaaggattccccacagaaacggaggttctcaccaggggaagtggagggaggcatttacaacagtgtgagattacaacagtggccgccctggagatgtgagggctgtgaggcaatgcaggcagagctcctcaggcagaattctgtcatgcagaattcccagtagatggaatccagcctcttttttccttccctttactgcttaaggaatgcagcttctttagattgcttctaaaggcacttccttcaaacattaagttgattctacctttaatacttttataaacttttaattctatgtcctctcaacctggatgtgttttggaaagatttattttaagaggggggttggtatggcagggggaaatttcacttaatctgctttttgtcattcagtcaaaaattacgtatggagcctctgctgcatacagaacaccccaaagtctgtgggggatggaaaggaaccatgagaagcccctttcctggggtgtctgtggcccgttggaatgtgtggtgggtcaagtgtgtagattctgtggtataaggtggaatatgggcaagtgctgttagggaggtgggaagctggagggagcccagagtggagcagagccccatccagctgggacaatacaggaggactagatggagggggtggtatctgagccaggcctgaggaggggtgtggttttataggcatagctgttgggggcagagtggggtggaaggaggagtggcccagcagaggtgagggagagggagctgacagcttcattcttgatgctcactttatgccaggctctgggcatttggacaagtaacagttcattgctctattcaaggaagaaccccatcaagtcatgggtgcccagccgaaagtctttaaggggtcgagtgagggcgtggaggaggcagccttcatctttcctgaaaggcacagagatgggatggtgaggatgaatctgtgaaatgatgatgattcctgggtttctggaggcggaggtctacaaggagggtggtgcaatggagccaggtggtggaagaccttgaatgccagagtaaggagtttggtggagattgttgaggcactagttcttcagggaaggcctcatgggtgtgtgttctgtgcagttgcccagggccccatgctcagcttaatgctatggtattgtcttcttgaaattcttaatacttttgaaacaaggggtcctgcattttcattttgcactggacttgcaaatcaaagcatgcttgggggatgatgtactttagaacagagctgtgctttagagaagaggttgggccatagttgggaggctgtttgcatccttttgaggaagggggagtaaagggcccagacgaggatgggtatgctggggatggagggaattcctctgacagcctgtggccaggcccgagcagcaggcggaggaggagccgccatcagctcttgactgggggacattcttggagctgtcctctaagtcaggcctgcaggtgacttccagggatagcgttggtgttccaaacggcaattgagaagactgtcttaatatttttactctcaacagtaagctaaagctgacattggcagtctcattcaacgaatgtgaaataaccagaaaagacattccaaggcgttctggaatcaaacagatggacggagcaaacatgttaaaaacagtaaatcacaacttgaacttcagctaatcataattgcatttctctttccttatttaattttgaaacatcttcctaagtagttttttattttggttgcttttacttaagagaccttgttattatagggcaccccagttaaagatgcctcatatatgacatctgaaccaaaaaaccttatcatttaggacatgatatcctttctgaggtttgagaagtggctattttgtctcttacaaagatttgtagggaatttactgagggaattgttgagggactagtgagcaattcttgttcacatagaaatgaacaaaactgcatttacccagtgattttcaaaaacatactcccagtaaatcaaggttgctctgaactgaacttagggtctcaaccagctgcagaccagttacatcttagcaagcagggctttgagtggtgcagtgggcagagtgtgtggctctgacctatcaggtgtgatcccctcctactgtgcactgtttcctgtctggcacagacacaggcaaagcacttttgctgaaaggacagaaagactcaaggtgaaggcagtgccatgcaggccccggatgctgtgctgagtgtcttggaactgaggaagccgctgatggccagtggggccagggcagggcttgcgaaaagattcaaggcttcattccagtcacatggacagactggtactgcttttcacattcttatcaaaaagggctgcaggcaggtacaaagaccactgcagcctttcctgtcctcatggcattgccctacaactggccacctaaaatgaccttctctgctcctgcatccttttaggaatgggtaacttggtaccattcagatgtgccatgctgaaaaaatgagagtgctttcttttgagggagttgtggaggaatacatgatgtcctatatgggaggcccataaggttagtgaggtaaaaaaaagaatcaagagtttttcttgctctgctcattcacccatagtgatggagagatttgatttcatctggatgctcgtgttccactgacagtgagtactgctcagccagtgctcgccgccaggtagttaggtgtgtcttttacaatgtttagcacagcgaatagagaaagtgcctggcagatgcttggccatctcctctgcatctcccatcgtaccaagtatcttgccttgtgcacagtaggtgcttgtctgtggggcaaatagatacatttgcagttgaagtaatcctgtttctctgcctgaagtaagagacattcaccatctgtagagtgggaattgtgacttcctctagatgcagggacagttttgtaataaagcatcctcataacctcacttggccctttttggcacaaagacctgtgaaggcggagaccatgacctattttgctcagcatttatttcccagtgcaaatactcagtatttgttgaatgaataaacaaatgggatacacctgtctttcttaaattgcagaagttcattgcttaaagtagccatgtatgtcttcatcaaagtttcttcagttctcaaaatcttctcatatatgtctgtgcatacacacactcactcaacccagcagttggcatacaatggccatttggtatttgttttgcaaaagaagttagtaagtggcagtaggtaaagaaaagggcactgactgggaggtgaaagatctggacccaagtccaggtttggccacctaagcaatctggagaccttgttaaggggctgggtatcctgtctcgcccagtcagaatcttgctgtctaaatggggctaatcactgcatatcttgaaggtggtttatccagctcacaagaaagaattgatgtgcagcgcttgtcaaagttaagccttgtacatgtgtgaggactttgttcttgtcaccgatatatgctcggatccccatgtttgatgtgtggctaatgtgtatgcaccttctccctagtccaccctgagagctgagggtgtcattttacctaaataaagaaatacattgttaatgtagaaaatttagaattcacagaaaattgtaagtaacaacaattacctgcagactgtagcccagagataaccactgttaatcttgtgggatgtttctttttgtacctctcctaggcaggtacattcacatcacacacacacaaagacacggtattacttcagtcacataaccattatttttgtatcaaatttacccaagtagataacccattccaggaaaagaaagagacttaactttgttgttctgttactttctcagggcctagtgcactatgagaccgagcaggtatttgttaaatacttaatggctttctggaacatcagggctgacaagattctgagttataatctaatgttctcagctgaagtgcaggagaatgaaggcctatggagagaagcaggcccagggtcctagggctggatgtagctgagctagaactcagaaatgtgctgttgtcttgcccacgtctactctctactaataagttaagaggcacatgcaagaaggcccatctggttggtgcttctagcagagaagctgattcatgcttaattttgaccacatctctaggtttgtggttactgctcagaatcaggatagcatctgggtatctcgaagctgctgtctccagtggaggctttggactgatctcacaaagttatgctgatttctacatcagcctacatctggggtccttctcctggttatcattgtttgtactgtatgcacagatcccacgcccttacttaataatccagccttggtggaagtatattctcctgtgtttttgttggaatataccaaccctgtattgccctgccctgcctttcgagcatcgtgaaaagaagtccttctttctcttggtggttcttgcctcatgctctcaccctccctttttgtggtgtcttactgagccagttgttcattccccagcaaacatttcatgtttacagtcctcaactaggctatactgtggaagattcagcagatgtgcaagcccagcctttcaggatctgagtcgagagagagaggggacattatatagagaaattatagctcagtttataaagtggccagtgacccaggagagcggcagagcacaggctgtggatcctgggtggcaggaggcctttgtcatggttattgggggtatagggagctgggcaggcagggatttgaaaagaggggcattagagcttgacttggaaagggggactgggatgtgaacatttggagattgcaggagaaagcattcctggcagagcaacaagtagtagatgagaagggtcacaggtggatccctaggtgggggtagctaaggattctcaggatctggttgctcaatagcagcaagttgagttctgcacctctgcaggccatgacctgggaaaacatcacctcccaagccccccactgcctttacttgtccaatgctattggtgcaagtagcctggcaagttgatacaaccagttttcctttgggacaagggacttggtgaggggatctgtggactcctaagagccttccagtggattccaggtgatttgggaacttcctaaaattgcacagatgattttgtgtacatgtgcacctttcccccacaactttcaaagatctctgttacccttgaaagtgtaggaggaagagggtcggcatgtggattaattttaaaaccatatttaaaaaactctcaaatcatgtgaagtttgtagtggaaagctccattcagtttgaaagccttcaccattctcaggcacagctcactgatctccttagtctgtgcacccctgatgggcaagattatgtctcatccctgcccagaacttggcctcagaatcttatttgtgatgtttgttcagggaataaaatagctttgatgtggatataaatttgcatgtgtgctgacttgcaatagagtggattttttttttaattgctacctctaggatcctaaggctgactttatgtggaggagacatttccaatgtccgtcttcctgcctggtccctacctgaccctccttattaagcacagggataagccttggcatgtcctgccagcaagctgagggctggggctgtctggcctgtacttgccaaatgtagtctgagctgtcttctctctaaaggactcttcagccccatgacccccaagtatagagccagacccaaatgtgcctcttcacatgttccaaggtgggcatgcttgggaacctcatccagcccctccttgacctgaggggtctgcagcagcagcccatgctcatcttaggcagtataaggactcctgtggctgcagaaccacgaggtgggactctcctcaggggctgcttcttggtgaatctgcactctatttataatcaaaagctctgccagatggacgtgaggtgcccagcagagggtaggaacactggcagctgccttggcattttgttaagtaggtatgcaagttgctggcccatcagagagctgtaaggtgctggaatgacagagccatttgttttcccttgtgacatggtctgttttataacgtggtgggtgagatcaagggagaagagtgggccccttcatagtttttcaaagtccttttttccttttttagaaaagttcaaagaggacattgactttctacagtcacaagcatcagcctgtcttggagagacagcagctgtggcatgtagtattttaaggtgatgagccaagtcagacaagtcctgatataggtggggtctggacatcctgagtgatcattctcatctaccactcctctatctgggccattctcattcattcagtagctcatggattgtctctctatctgggccgttctctttcattcagtagctcatggattgtctgtctatctgggccattctcattcattcagtagctgatggattgtctaatatgtgctgaggagagagggaatagatgcacatggatcctaccctcagcaagctttctgaacaggaggcagtggacacaaacagctgtaattagcacaaggtagcatgaagcattgtaagaaacttggagatgtgcgctggcatggggctggggtcagaggtggttggattgatgttcctgattcctcccttctgggatgctcgtgttttatttattttatctaaaacctgcagaacctttaccacttgtttctacctttaacatcttattgcatttatagcctctctgttcatctgtctgtccatccatccctccatccattcaccatctaacatttaccatcctaagacaggatgcagaaggaaggaagactcagtgcctgctctcagggagctcacctttgattgcttccttatggtcccatttgtgttgggggttttgttccccagcttaactgtaagttccttgaaggtcaaagactgtcttcttcagtgttcttggaagttgaaaaatctgtttggtcagtggattgctgcagctgtcgtcttgggtgtatgtgcttaacaaaaggcttaagagtgtgtgtctgcagggcacaccagccttgctgtttgcagtgctgcacagatgactctattagagtcttttggttctgatttggaaatctagagtggtgggagggtgggaagggaggtggggaaaaatacaatgtctcaatagaccaagttcccaaaagtgtatctgcacttgaggctttcctgaagaatgaaaagcttaattcgtgccttttctttatgctacttgttcttttgtctttttttttttttttaaggaaaagatgtgtcaatttcagttgcctaattcatttttaatatgggtcagagctgccatattcacacgctttgtctcatcacacctaggcttctgttgaaatgcttgcttcacaaatgaagtttaattaatagaaatagggaagtgaacacagggctgatgaatctggggagacatgacttggtgcctgcccagagaggtccctgggtcagattcctcccgagcctgttgtcagaggcagattcttacttagggagccaggatactgggagtcaggctggggcattcatcaacaatgcatagcatagatttgcttcttagcagatgtggctggcctatttacagttagaagaattgtcattgttttagaaaactttttttgaccaaaaaataaaataaccaccaacaaaaaacccagactcttgagttgaggccaggtttgaatctcaaagcaggttgacctattttcattacagcattatcaaaacttgtgattctacctccctaacatgcttttcctggtgtcacatgaattgaacacctgattcaagcaggagagagagagtgaagaccttgtccttgtctggggcggccctgtttcccactgtgctgtggtctgaacctctttgagtaatgcctcccagagctcacctgctaatgactgtgctccacctggggaggggctattgggaggggctggtccacgcagacagggctgtacctttcacgaagtgctttcacatcccctgtttgaccttgacaacttcccagtaagggaggcagtgcctgcagtgttatccttggtccacaggggaggaaactgaagctcacacaggcaggcagggggaaggcctgggagagaactttcaacactggcataccacggggatttgtgagagcacctgcctggagtccctgcctccgagaacttcgacttctttccagatcttctgctctcttatttgatttaagtagatccaaatatggttcaggaacaaagcaggccccaaactgtgtataggatatgtgggtaatgggccagaaagctcactcctctggaaaatgttggaaagtgacctctcctgagcatcccagtgacatggctggatgccctgttgagatatgagagaaggggctgggggacaaacccatggcaagggcactagctgaaggaattcatgcagaggagaggagagggcttttccactgacgtttccttgcctctattctgtgtgtgtgtgtgtgtgtgtgtgtgtgtgtgtgtgtgtgtgtgcattcctccttggaagatgagagcttctggtctcaaggggccatgccctgtttctcagcagcctcctcatctactctcttggttttcctcattctcttcgaggtaacaagtcctcacctatttttttttttgtggcaccctacagtgtctgcagtgataagagcaggtatctttaaaaaatcaaagccaaattaatctactttggttttttaaagtccccatggtccacaaaaatatttacagggactggagattatctgctagtattctaaaactaacagtaacaacgattctttacatttttatagagagcttcaaacattttagactatctttacttctgttttcctgttattcctagtacctctccagattagacaagatgatattaaatatttccatcttacagatgagcaaattcagacttagagacgataaggtactagccccctggaaaacaactgcactgaacctaggtcctttatttctgaacaagacaggcatcgtgttgaacttcatgaagaagataatctaataattgaaaatacatcaaatacaaggacaaataagagacgctgggggggtaatgtgggagaaacctaaccttgtctgagggtaaaggcagtgtgtaggtgagacatggatgctgagttggcctttgctgggtgaagagagtcaggaagattgtccagggcgtgatgtgttcctggaaccgtggggccccatctcagtgggccttgcaagccaggatgagtgctttggtttgtttttaaagctgtgagaagccactaaagggttttaagcagaggactgatgtgggttttagaaagactgctgtggctattaggcagaaacatgtggggaggggcaagaacaaaactggagagccagagcaggcagctgttagagttattcagggaaatgttcgtgctgtagactctggggtgactgaagtgggaagattcgagaactattggggtgtagaagggacagcagctagggattatttggttgtggtagaggacaacaggtaatagagactcaggattttggcctggatgtaatggggccattttctgagttaggtaactttttacattacagggtcttctctgggacctgcgggggcctgttttgggcaggagggcaggagcatggactcattttgggacatgctgagtttgaaatgcttttaaagtatgttatgtggaaacttcaggcaggaatggggacaggtggttctggagctccaaagagagaagtgggctggaggtgcaaattccagattcattgccacaaagtgaataactggaatagtggacaggaattagaccaccaaattctgtgattctttcgtctttcccgtacttcttgaggggatttataaactcaagctcaaaataggaacctgagctttaagagagatatagccacgtttggagttggtttaacaaaggctgttctgcgggtcccagagaagaccctgtaatgtaaaaggagaatctggtaggtaattggaaccaacaaatatacttaatgttatatcccagtgatggtgatctcagaactcacggttggttgtacgaatgctggttcctggtctctgtagaattgcttccttatggctgcacattccatcaagtggttctgcccaaatttactcaattagatcttggtggtgcatttcacaataagaaataattctgaaatacactcataatggtttcaaattttagatgaattctttggattaagacctaggggtatttccttggttgtagagaacacacacttttatgactccttgttatgaaggcaacagactgtgtaaaagaactctggagttgttggggcaagagctatgtggtgtttctccctgaagccctcagagggttgtcctcctcggatttcaagggacccgctctgtgaggcacactggagtctcaggggcaagctctttttcactgactcactcaccagtgtttgctgagtgtgtctcatgccttctttcttgcttgcccctggaacatgcacaggactcagacccagccctgcttgtggcctggggctggtagatctcatgcaggtaatcacggctgaggatgagctctgctttgtgtgagttctggatgaagtctgggggagtttggagacgggagatgctccttctgcctgggggagtagagaaatgcttcccagaggttatggaaggaaattggatttgtggaggtgactgacagatctgtgccccttgtgtcagtgtctctagctgcgacagacacatgggtcagcaggcgacccttgttttccctgagagcagcaaaggccctggtgaggatgtgtccagcactacaggactggctagctgctttcttttttacctttcagttttcaaggtatgaatttttaaccagatactttctaaccttaaagtgatttggtactcccaaggaatcattctgaaagttaggaaatttatttgtgattcattgagttgaactatcaataactgtaacagattccgatctcctttgtggaaaaaaaaagtaactgtcttctcaagtacaagaatgagagaaagggtcttgattaccattttgtcctgttcaccttttttggagaacacctttaatttcttggccacaccgtgctcgtcttcattttgcacagcaccactgttgtaactcctaaaacttacgcatcacggcagatgtgtgattctttcattctttagatctgtagttttcccttatacagaagttagtgtcttctcttccaatgtatttaaacctttaatgaatatttcatcaaatgaacttcatgtcttgtatttcattattaatgttgtttatgagaccctatcctcattagcataacttacaaactaagaggaagaatgatattttaggacagtggttggtgagagaatagttgcgcatccttctacacgtgtcaaatgtgggcctttagcgagcctgcaggaaaagctgggatgctgagtatgtgtctcgcctggggtgacagatggggtgttcatgttctgtgagctctcagccgtcccgagtgtgtggctgtccctgcagcatttggacgaactcccgccaagaggaagcctgggcatgggggtgctgtgaggcaggactgagtgtatgaatcaaggtcggccttgtcctagctgggtgacataagccaaaccccttgccgactcttcagggtcattttgatcttcccgccacccagatgtcccctggttcactgatgaccccgataactaatgtgtcattttcctctatgtgcttttcttttagagacaacgtctccttctgttgcccaggctggagtgcagtggtgcagtcatggcttactgcagccttgaactcctggcctcgagtgatcctcccttctcaacctcccaaagcactgggattacaggcatgtgccattgtgcctggccttgttttggcaaaaccatatggatgtcccatctaacactccagcctctcatttcaagggcccttttcccctttggccatccacttccacttgcataccctgggcctcatggtttgggtggctgtttcagctcctgaacctctaacttagtgtgctcctcaccagccttgcccttctctctggcctgcctgctcagcatcacccagggcctgttttccctgcagacctgggctctcctccttggccaacttagatgctagacctttcacctcacctcctcaaatccctttggtccttttcatcacttctgtgcaggacatcccagccctggatggatccagctagtggtcctggccctgcctggccatccagcctcagctcatgccactgcccctgcatccactactgttctgcttcatgagctgccttctgttgctctaaggagtcaactccttcccaccttggagcttctagaccgtgtcctctccccagatggctcctccctcacttcgtctattactttaagctccacatcatcatttgtttcctaggggagcctcctctgactgcctggttgaggtcaggcttgtcgtccagcctatacttaggattgtcacttactgtttgtgtgcttatctgttcaacacctggcccagggttgtatagggcagacctagtttcagaccttctgttccttcatgcccatgaaatgtcccagaaatcctattgccttggcatccaaatgccattgcccagactgtctcctatagtcagaaacagctcagaaagcttttatcagcatgagtgtcctagtttttggttcacaaaacaactgtggtcatcacagttctaattcctgttggttggttggagagtcagtacagagtattagctttgggccagattccttgagttaaatccttgccacttataactaggtgagcctgggcggccgggcaccctctcgtttcctcatgtagaaggtgatcatggtgcccacatcctggcattgccgagaggatcgagtgagcgggcataggtacttctctacactgagaagcactgagcacttggtgagcatccggaaacatctgctgctgttagtgtgggctgagctctgtccgctgtgggctacagaaggccctactgcctgtcctgcatttttctcttatgtatgggctttcagtaaacatgtttggattgaaatacacatttgaggaggcactggacccagacctttgagcctgtgattccaaaccctttcctcctgtgcagttgcagctcacttcccacatcactcagtcctgcctctaagcgacactacactgtcaccttccttcatcatcactgttggcgctttcacataagcaagggccccatgtatttttctcttattctctctgtctggaatactctaattctttccttgaatccaatgttctgttcacctcctcctttatatttttaattttttgttttatttatttatttagttttgagacagagtctcactctgttgccaaggctggaatgcagtggcatgaccttggctcactgtgacctccgcctcctgggttcaagtgattctcctgcttcagcctcccgagtagctgggactacaggcatgcaccaccacgccccgctaattttttgaatttttagtagagacggagttttgccatgttgcccaggctggtcttgaactcctgagctcaggcaattcgcccaccttggtgtcccaaagtgctgggattacaggggtgagccaccacacccagcccacctcctcttttaataccagcttcacaaacatccttcaggatatgtctccggactctgagcctgtgtgttgctctctgtccactcaatgctgtgtcgatttgccctagtaattggcaattataattctaagattataaactacagtatcaaaggtaagagcaatgtttcctctcccaggaactacacaaagcgtagaagaactcagtatttcctaggccttcaggaaaagcttgttgactaaaagaaataaccagttgacctggttttggtgtccgtttatttttgcgtggatatgaggtgtaccctgggatccttgttaaatctcatgttactcagcttgttttgtcaccagtgttgggcaaaactgggtgacaggctctccaccttctctgcccctttcttttctttccctgcttttccaggaacaccttgattcttctgtacgctagggtgtcatttctctcgttccttcagcagttcaatgagagttcctgagcactgcctacagtgtgacaggtgctcatctgagcgtgaggagcagcagtgaaccaaataggcagggctcctgttctggtggagctatgttctagtgggaagagaggtgataaaggaatatgtccacgacataggtggtgcttcgattctagcagggaagacttatgttgattggccaggaaagacgtctttaatgaggtgccatgtaggcagggatctgaaagaagtgaagggagcaagctgtgaggatagccagggcagaggggatgggcacccagcctggctgagagtgtgtgtgtgtgggggaaggagatgtttttaattggaatggagtaggggtgaaaggaggagctggaggcatcagaacatagaaggccttctaggaaccccctaaaagggccttggatgttactccgaattagatggagagctgtttgaaggtttttgggagcaggggacattatctgatttgtctaatgtcaccttaggtctctcatgagcttaaggaaatattaactcattcataggaggagggaagtaacttctgttttaaggagggacacttgcctaattcctctttgagtaaggcctaatctgtcagagtcgtggttggactgtgttctgaactgtagcatcccagggcctgaccctagttctgtttttttttttttagatggagttttgctcttgttgcccaggctggagtgcaatggcacaacctcagctcactgcaacctccgcctcctgggttcaagcgattctcctgcctcagcctcccaggtgcctgccaccacgcccagctaattttttgtatttttagtagagacggggttttgccatgttggcccggttggtcttgaactcctgacctcaggtgatctgtccgcctcagcctctcaaagtgctgggattacaggtgtgagccactgcgcctggccaatcctagttcttttactctcttgcttttgctcagcctgtaagtaggagtaggaagtttcaaaagttacaataattaacatattcacgcctttttcacggtctgggggagctaaagcaggtgcaggataaatgaaggaactgaaccagctaggaccaaaatcagtaatttgaaccaaacttgatagctactgttttgaaactgtcattcctacctataggtagataagggcaagagattataaaatctgatggccacgaatctaattttatgagacagtgtaatgataaaaggaatgagggaggctgataaatacagatctgtatgtcttccagttttagccagcttgtcttgtttctgagtttcttgagtttcttccctgggaattgttttaggcccaaatggtaagcaaaaggaatatggtgtaagtggaattaaataactccccccagcacctcctactttctctcctcagatgtgtgagtggtaaatactttggaagaaatacaccccaagcctggtgtgttcactctgctcccaaaggtgcttgggcagttggtggtgatgggagtgttggttgattgtagctctgtatatgagggtgtctgaggattgtaaaattatcaggaaatccctcttggtgttgaagtcatgagcaggtgcaggagaggtgaaaggaaagggcagtgggtattcttccccctcaaagtgtgggaagagcagtgctccaaggccacccaaggagctgggattttttccttctaagctggttttccctttctccccactcccaactagcacgtgggcagaaggaagtgctttatctgcctgctacagggctgggaaatgtggcccgtgtactgcctcagtgcttgggtcaccagcggagatggctgcagtcccagccagctctgcaggagcttcagtcagaaacgctgatgttaggatgcattcttcagggagctgcagcttttcttagaaggtggaaaaagagaaagaagtgagtaaggtgaagtcttagaagaaggaacaacagaaaccaagttcagtgacagcccaccaggcctggcagagtctgacaaggagtctgtgaggtagggagtgtgcacgtgtgtccgtgtgtgtaaaggctaatggaatgggagacgcccttgaacagaaaggctttcacccataagtgtgaagtctggttcgtcttagcgacaaaagttagaaaaccactttcagacaataattgtattattttacagcattcgaagcaacctgagttggtctcaaaggtggctccctcaggccttacctgaggatggggacagagttgctcaaatgctttgggattactgagactagagtcaggataagctcgatcccaggttcctcaggccatgcttttccactagccaattcagtcccttcagcaagtgtttgtcgagcacttactagatagcaggtactgctcttggcactagagatatttggtgaaaaggtcagcctggagcttccattctactcaggagacaaatgagtaaatacaggaggtgatttagagagcacctgcctcctgtaggaaagaaagggaggttatgcaacagcacctggtaagggtggtcagggaaggccatgtggggctctgggacagaattttccaggcggaaggaagatacagaggcttcaaggcagaaagaaacatcattgtggagtaatggcaggtggctgatcccactctctgcatgcagaaaagagcagcagccttcttgaagccttcttacctttctcacgttagtacaattccacacccttgtgtgtatgtggcagccactgtcataggcatcagggatcctgcttttcttccccttgaccaagatgtgaagatttgtgatcagagcatcagaaataaagtcccttgagacttgcagattgaggaaaaaatgacaggagtcacccagatatgaaaatcagatcttgaattcgtctattgatcaggcattaggcatggtgggagttcagtccgtttcagctttaatgtcctgttgttttgctattgatttctttcctcaggtttcaattggtattttttccatgttgtctatacattggtcatctattttagtgatgctaattgtttagctattaaaatggtgcattagtcccacacaactcttataaacagctgtgtagtaaggagtataatctttgtatctgtagtcccccttagggttaataattaggtttttgacagccagctcagccggcttgttttcacagtgccctgtttcccactggagaatgcaaggatgcagtcacgggaggaccaggtggacagcatttggaggatttgggtggatctaagaatattttcatttggaagaacaggatggacaccagaggccaaaccaaggagtagaggaaaacatggcacctttcccccatcccacccctggaactttcacccacagtatagggttgccttgaagctctggattaccatggagctttcaatgagtaggaggagacatccatttgtcctctgtctccagctggccccgggaactattcaacatctgggattgcttcctgcggtgccccctgacccaactcaccagagtctaccgactctagacccactgttgtcctgggcccctgcctgactcttttacccactccaggatgaccctggtttctactgacacctgcctgacctaactcggtttgtctagaatgcagttgaagttgcagcaagggagatgaggaagggtaagaattggtgaaaaaaattacaaaggtttttcatggttcctaccctcgatgagtttacagtctagtcttcatgaggacatgtgctcatttgatcataaggcattttgtgacatgtgcctggaggtgattcagacagatgggcagggcaggagggaatgctggggtgtgtatagcaaaatgtgttattaaattatggcatctgttgtcaacaaccggtttagaccttcttgatctcctggggtttcttttcagttacagaattctgtcatcattacagaaacaaggcttagccacttactgctttaaataccaaaaagagatggcgaataagattgggatccatggggctttgagaacctagtagcgtgtgtgctgtatcacagttctcttctggctgatactggagagggccatgcaatgctggggacggacagctgtactagggagtctggattcgaattctggacatccctaggctcactgtgtgaccttcatcccccctccccccactccctgtaccctttgagtgcccctgccttcttactctgcatgtgtgtgcatgtgcatgtgtacccatgagtgtgaggaaggataactccagtgttgggggagagtctgccaggagataggtgccctgagtagtggtcttctcttgggcacttaccgactgtgtcattttggaaaatggccccccccaaaagatttccacatcctaatctcttgaacctgtgagtatgttaccttacatggcaaaagggatgttgcagatgtgattaacttcagaatcttgagatggaaagattactctggatttagatgggcctacccaatccttacaagagggaggcaagagttagccggagaaggagctgcagtgatggaagcgcagaagtcaagagtgatgtaaccacgagccaaggaatgtgggcagccttagaagctggaaaaggcaaggaaacaggttcagccctagagcctccagaggagcacagtcctgctgacatcctaattttagttcagcaagacccatttctgccatctgaccttcagaactgtaagatactaagtttgtgttgttttaagctactaaattatagtaacttgttatagaagcaatgggaaacatacatcaattattcctctggatattagttgcttcagctctaaaatggggacacaaaatgttttctgcctgaaggctgagaactggaccatgtgacttttggcattccttcaagttctagatttcatgagagagaaaatcgacctgaaaatgcattaaatgtttaaaaacatagggaagaaagaaatatacaattatttaatgtctgtgtatgtcatttaattcttacaaccacctgagagagattttataattattattttcttttagtcattcaagtatttgagtgcctatatgtgccagatggtgttctaggtgttagaaataaagcagtgaacaagaccaataaaaatctcctgtctttttgaagcttatctttagggagacagatgagaaaccataagcataattgctaagtgaatcatcagctaggttggcaattgatagctgggatggaagaaaattagagcaggttgatgggagcatgttactgactaggattgcaggagctcagagggtgagcagtttgctcaagaccacagcaccaggaggtagtggagtggggatgaaacccaaaatctgttggaatccagaggcctggtctgatccttttctcaggctagtagaaggctctgcctgactttgcctatttggattcccccactttactgagggagaggagtccccactgccagctgttgttaggacaattgctatcatcctgggtttcatatttttagctcctttcccatctctctaataagtaaatgccagagggctagggctaggctgatgctgggaatgagacgaggaacacagacggcacaggtcgcttcatgagttccagaggcttgtacaggagacacatgggccggccactgtttcctgtctctctgagggagctgcaactccagcctttcatctcacaactcaagttgcttttgctgcagctgaggcctgaatgtgcatttgtaactctggggaaaagggtgttcagttatcaacaattactattaggttggtgcaaaagtaactgcagattttgccactacaagtaactgtaaaaactgcaattacttttgcgcctacctgatatttttatgttgcatggccttttcctggcagtttgatgtttatcatttcctgtcattgaggaatgtgtttttctaggacagtatgaaggctttcaggatctttagagggaagctctaaaatgtgcttctctctccattaggttggctcatcagtcagattctgatttgaaaatgaagggtgcttggcagtaagaatagtggaagtaaattttcaatattatacattaacaagtcataactaataacttttatgggttcttcccatctcagatttcagagaatatttttgggttgtgttctattgatgagggcttaaagaaatgccttgttctggctgggcatggtggctcaggcttgtaatcccagcactttaggaggcccaggagggcagatcacttgaggccaggagcttgagaccagcctaaccaacatggcacaacaccgtctctactaaaaaaaaaaaaacccaaaaattagtttgggcatggtggctcatgcctgaaatcccagctactcgggaggctgaggcaggagaatcgcttgaacccaggaggcagaggtcgtagtgaactgagattgcaccactgcactccaacctgggcaacagagtgagaatctcatctccagaaaaaaaaaaaaaaagaaaaccaaagcaaagccttgtcctgttgtgcttggtttgaaactgccattccctttagtttctgcttactgctacttctacacaaggtcaagagaaagcctggcttcagaagaattacatagtcaacccctggggctagctagctgcagaagaacttgaacttttggttaattaatggaggctgggccatagctggcaaagcgggatgtgcccatgcctgggtgttgagagactgggtcttgacatggctctgcaactgtccatgtcatcttggaagatctttctgagttgggacagctgagaaacttcatgccatttgacagttttcttgaggtcatgagcaaattaaccagtcaaggaagtaaataagtaagttttggtggaacaagtttgtatgttattggtgtgccttttttttttttaataccataggtgtgttcctgatgaaaagggtgtgaataaatggaatttaaaatagttttccaatgaacggaatctttcacatgttaatatatcagggtcttctgcagtgacagctttgcctgaatttcatttttcacattagcttaaaaatattttaaagtaaaacatgttaattttgaaacatataggaaccagataaaggcaatatgttttttataaaatggaatcatatcctatcattggacttttggctgttttcctcttttaaccactataaaccatgttgcattgagcatcttggggtagcaaaatcacagattcctgattatttctttagaataaactcttagccttgaaattgctgcattgaagcatatacaggattttttttatatgagtcgcaaagttatttgctttgcttttgctttttgaaagagataaaagcttagacatcttgacattaaaaaaaacaaaagggttaatagcccagactttaaagtcagacatacctgaatttgagtcctggctccaccataacaagctgtgagaccctgacaatttacttcccatctctaagcctcagttttctcatttataaaatgggcataatatccttaaactcactgtgagcattaattgaatgacacgatataagtaaaacaccataccgtacatgaattctctatatgggaattcttactaatttgtacctgaacctctccttattcactagaagagtgtgaaaacttagtttcctctctgctccacccacggctttctagcagtcactgtaggcccaaggaaacccaccaccgtcttggtgcactgtaaccagggttgaggtgtctgtcctaattttgaaagcctgccttcagacatttatatgttcagacaaactaatcaggctgaaatttctcatgcttatttgcagctagatgaagcaatccatttagttgctttggaattacccaagcatggaagaaattggtttctcagccttgagatattctgcagatactgaagtacagatggcaccagggccagcttggtaaaaccagaaacaaggggcctgagtttggccctttgtcagggcctctgtccttgggaactggtggttccacctgggccccaacataagcctcagcttttcatttggccagcatgtatcatgaagttacttcttatttcaccctttgggggactctcagctgctcagagcttttgtgttttctcttttcagcttcctcctcaattgatacggatgaagtatttgctgaatctgtttctctttcctgaatcagaggcccagaggcattcatatagttgctttctggtaaaaccttgctgatctggtatttgggctgtcattagactgtagtgcaaaaagacgaggtgaattttgggactccagatttcagagtgtataatatctcttgtagttaatattcacaacccatgagataggaacagacagggaaactgagataccaaaagtaatgtgcccaaagacgtgcagctagtaaatggcagaactgggatttgaattcttgctgactatggttccatttcaactattactcaataccaccttttaatctgcttattataatgtatttcataactttctatgctgtggtattgatcattcattcatcagttacacaattattgcatggaaggatacaaagagaaaaagatatggcaatgtggtccttgttcttagggaattttcataaggtattaacaggagaagcaacaagataactatagatcataatataaaaatacctcccctctttgttagatagctttaacccccctgttcgctgaaggacttggttctgaatgattgaaacagataatcctccgtgattcccgtacatgtcctctgtgcccacctcccactccagcggtgagtccattgtgtttttcctttattggcaaccctaacgtgttggggcaccctctctaactccacagtacgttgtaagtttggtgttaggagagaaatgatctcaggcctgcacagcacactctttttctgttccctgccttttaaggtcatgccctcttgtcatgaatataagaatgcctgtgcccccttcggagaccggtgccactttcaggctgtgtgcatgctcactgcccctccatcctccttgagaaccatcgatgtgcacagagggttgtactgtttctctgtacatcccatcagcatggcttactcaagctttgcttcctgtcatatgtactaaggttttcaatgtgaaaatatgaaattacattctcatactaaataggctcctttaatccacactcctctctgagaaccaatccactttaccaagatctacccctcttggggctgtgctccctggttaagaacagctggtttagtagcaagggagaaggcaggagatgatttaaaacagaccctgggattctaaaagtcctgggattttataattcctgggattctaaaattagctgggaagattttgagtagcggaaaagagcctgccaactttagccatcctggataataccattctgttttagcttgatcactaatttttctgaccccatgtagaaaacgtatgtaaatcatggtggtggtagcagcagtagtagtaacaacaataatgataataatcatggcagtagctcccctttttttattttttattttttgagacggagtctcactctgtcacccaggctagagtgcagaggcacgatctcagcttgtcttggctcactgcaacctccacctcctgggtccaagcgattcccctgcctcagcttctagagtagctgggattacaggtgcccgctaccatgtctggctagtttttgtatttttagtagggacggggtttcaccaggttggccaggctggtcttgaactcctgacctcaggtaatcggcccgcctcagcctcccaaagtgctgggattacaggcacgagccaccacacccagcctgtgttagattagtgttagagtcaccttattgatctgtcaacactaggtcttatttcttcaatctatttgtacccattaagaagcctttcctcattctcccctctcctcacccttcctggtctctgataactaccattctactctctatcttcatgagagccacttttttagctcctacatataagtgagaatgtgatatttgtcattctgtgcttggcttatttcagttaacataatgaccctggttccatccaagtggctgcaagtgacagggtttcattctttttatggcagcataatattccattgtgtatatatgccacactttcattatctcttcatccattgatgggcacttaacttgattctgtatttgactcttgtgaataatgctgcaataaacatgggaatttagatatctctttgatatattgatttcctttctgttggctgtatactcagttgtggaattgctggatcatatgatagttctatttttagttttttggggaacccccatacagttttccatagtgctgtattaatttatatgcccactaacagtgtgtgagggttcccctttctccatatccttaccagcatctgttattccctgtatttttgataaaagtcattttaactggggtgaggtggtatctcatggttttgatttgcatttctctgatgattagtgatgctgagcatttcttcatataacctgttggccgtttgtcttcttttgagaaacatctatacagatcttttgcccattttttaaattgggcttttttttccccctattgagttgtctgagctccttatatattctggttattaatcccttgtcagatggatactttgcaaatgttttctcccattctgtgcattacctattcactttgttgactgtttcctttgccgtgcagtggtgcagctttgctgagctatttctctccagcggacgaagttgtccctcttggagagtgagatgcagttgcgtcacaggatgttgtcatatgctgggcatgtggcacaggtgaggtccctagagccgtgaaggccaggagggctggttgggaagcatagacctacatagcatgaaactgtgctcttcattttggttttgcatctgcggctttctgagagacctgagctgacacatggaacagatatggttctcccttgagaaattgttccaaatattttgatgtacttcagccagtcactgaaactctttagagtgggaataatgctcatgcttgccttgaacagcagtggcacagagtgattgaaagcctgagctttgaagccagactgctggggtttgaatcgcacctcggatattaactgctttaccttgggcaagttttgtaacctctttgtgcctcggatttctcatctgtaaaatgagacataataagaaatgtaccccttggggttgttgtgagaatgaaatgactttctacctttaaagcacgtagaacagttcctgggacctagtatatatagatggtattacactgtgaaatcatttgattctctaaatcaaatgagaatgcttcataaattgcaaaataccactcagtactcttagcgacagagggagaaaaaatggaatattgtgttggaagctatagtttataatcccacttcatgtggcagcaataaaactggcaagttattgatggggagcccacaaacatgacaggctccccagaacaatgatgcctcatctgtgcatgaatacccctggggaacttcaaaatccatatcctatggttgatttccagattcactgaattagaattttgcagggatacggggtactcaggaaggttttgtttattttttacagaaagatttccaggtaatcctaatgcagctgatgtatggactggtgtttggtaacttctgacctggatgctctaacagttggttatatttaatgggatgcaggaagatttagtagagggcctgacagcaggtatctacatttacataaattttcattaggtaatgcggatggagcaacacaggcagatttgtctggaggaaattctagacatctaaagacacctaaatcctggggctgagagtatggctctatttcttattgaggtcagttttcactggctgactgattcccttaccatgaagcacaaggttgatgggtactcttaattgtgtgaaaagtgggaagtgggaatagttgcaaagggagttggaagtaggcagttttgaatcctggcttgcctgctgcatactggatggaagctgcagatggaggaaacagtgcagaagactcactgagcaggcatttggatgactggccagcagatggggagtggagctcagtagatagccattctgcactcttcaggagagaagaacaacctggggccatgtgttcaataaagagatggggctggcacattgttgaggaggagaaggaggatttcaaatggagggctttttgaagaaggcattgaacacctccccacccacccctgccctgcacttctccctgtagctcagaaaccttttaatagccatgggaccaacatctagcagctggcttggttttgctggtccttgctttaaaatggggatacatatccctgctttacagacctgctgtggagttggatgaaatggtggatatgaaagtgccttaactgtaaagtgctgtacatacttacagaagcattggctaccatgtggagatggcgtgccccttggtattagtaggaggggacagactctgaccctctaccaggggtaaagccccaaatctaaagatctagaaacattagcaccttcatttcaaggtctgatatgtaagaggatggacattcctaagatttattgtgggcagagtagcatgctcacccctgatggtgacagtatccgtagtgggttctcactgtgggctgttgcatttaggccactggttatgcctgcttcccagagctcacatgtaactccattcctttctcctctactcaagaaggtgcacttatgtgtgtatgaaacagggacattattaaaaaggtaacctgaatctacctaattaaaagcacaataaattcaataggttattcagatttccatactgtactgttagaaataaatgacattcacacactgcatagcagttgtgaaggtgagaaccgcgactgtgggtagggagatcctccagacatcagcaattcccatgtagtgtgagaccaccgtggagggctcctttgtgtgtctggcaccgtgggaagttcttagggggacaaatgaggtatcattttctggcccctcaaagtactttcatctttccaggaatgtgtaattatgtgcccaaatgagtggaaggctcctaggttctgtagttgttcagagaaagaagggactcgaactaattgaagtgattgaatgagcagcacactgaaagctagctgtcaaatctgtaattataacttctgtgcagtgcatttgacattttacagcatttctataaggataatgaattctgatgccttcagaagccagataggtaacaaaaatcagggaagcagttaggaagactacacttggatggttagtattgtggtgaaccagaatgcgtgtggcccacctttaagacatggcgatccaaaatttaaaacagaagcatagcacagcacttctgattttcaaagaacttttacgaatgtcctgtttcatgttcacagcatcctatgatgcaggtctgttctccccttccagagataagaacacttaccaagatcagtaaaggtggagatagcatgtgacctggagactgcaatgccagtgctcagagctgtgagatgctttccctagaggccctgggtcccaggaccaagcccttggggaaagaaggtatcatgctttcctgaagtgtctgccctctccccagagcttccctagttattctctgagcacagctctggggagatgggcctctggacctgtttgtttctactgttaccccgtgacttaaatgggcccaggaggcaaagactaggaaacaccaagaaggctggtgtgggaattgaagaaaaccatcaactgtgtcaacagactggacccaataataggaacaaagtgctgaaatcagctttgcagtcacatttagttggctgacctgtgatttctcaactgtctcttttttatcttttaaccatccatgtcatttttcactgaaagaaaaagagaaatgcagagatccagatggagtcccttgaacccttgagccaaagtacagaaacccctgcactgtggctggatgcccctgaaggagggaggccatgtcagttacgattaatgtgagcagcttctctcattccagaaatgtgacctctggttacagcaaatgtgacaacatgaattaccttcaattatggtgaactacgtttaactacatgattgcctccacaccttggtgggaactggctgctttgatagccttgaccatggaagaaaaagacagtagaaaagacttggaaatgacaggcacctagaatctgagtcaagggtacagtggcaggccaagggctgtgggctttctgtattatcagtaaatgtgatatgtggtttgggctttgattcccaccagtgcttgagaaagggatagttacccactttattgagctaaaatttacttaaaacatatgcctttaagtatatattttacagatggatgttttgataagtatatacactctgtaactaccaacccactcaagatgcagaacactgctatcaccataagggtcccttgtgccctatctagtcagtcctcacccccaattcctgacccaggcaaacactgatctgctttttactactatagattagattcatctttttactattacaagttatattcacgtttcataagtgaaatgatatagaatgtaatcttctgtgtgcatcacaagtttgtcctttttatggctgtatagtagtccattgtatggatataccacaatttgtttatccctgtacctgctgttggacattagagtctaaacattggaaacattgttttggctatgaaaaataaccaggttttggctattacaaataaagtggctatgaacattttatataggtgtttgtgtacacacatatatgcttttattacccttgggaaaaatagcaaagactgcagttgctgggccatattgtatgtaggtggggttttggccctcattatttttgatgctccctggtgatacacctgtgaacgtattatgttacagggcaaaagggactgactgtgcagatggaattaagcttgctgatcaactgactttaagataggaaaattaccctggaagtgggcaagcccagggttatcacatggacccttaaaatcagaaagggagggcataagccaatcagagagacatggtagaaggagaggtcagacttaaagagtgagaactcaacctgctgactttgaagacagggaaaggaggccatgagccaggcattgctgatgtcttctagaaggtgagaaggacccccagctgtgacagcaagagtggggacctgtcttatgtaactaaattctgccagcaacccgaattagtctgaaagtggattctcccccagagaataagagtccagacttatagttttagcttttgcatgtagctctatgattcattttgagataattttatataaggtatctgtgaagtaagagttgaagttcactccttaacctgaatatccagttgttctagcatcatttgttgaaaaactatgcttgttgaataactttggctcctttgtgaaataaattatgtatgtgtgtttatttcggaactttctattctttcctattggactgtatgtctcttcatacaccaatcccactatgtcttgattaatgtagctttatggtgtatctggaaatcaggtagtataagttctccagttttacattaggttctttgtatttccatataaatttaataattggcttgtcaatttctataaaaatagccctgtttagattttgattgggattacactgaatctatatctcaatgtagggagaattgacattttaatatcaagtcttctgtccatgaacatgtatatttctcataatttatttagatttgatttaatttttttcaataatgttttgtggttttcagtttcaaatgttttgcataattttctaaatgcatccctatatcatttgtttctgatgttattgtaaatggtatttatttcaattttcatttgtttattgctaggatatagaattaaaagcagcttttgtatattgactctgtatcccataaccttgtaaactcatttcttagttactttttcggtgaattcattaggattttagacatatagatcatgtcatttgtgaacaaagatagttttccttctcccgttataatcggtaagcctttaatttctttttcctgccttattacattatttgaaacctctattacgatgtggaataggagtagtgacaatggaatccttgtcttgtttgtgatcttaggggaaagcactcatttcttcaccgttaagtatgatgctagctgtgggtttgttgctgatgtcctttattaggttgaagaagtttctttctatttctatttctcaggagcttttaccatgagtagttatggaattttataacactcttttaacgtatctattagaatggtcatatggttttcttttttattccactaatatagtaaatagcattaattgatttttaaatgctaaaaccaccttgctttcttaggataaacatcacttgattgtggtgatggtgccttatccttttgatatattattgaatttaatttgctgttattttgtaagaatttttatgtctgtgtacatgagggatattggtttatagttttctttctttaaatgtctggtattgttggcttcataaaataagctgaaaagtgtgccttcttcctctgctttctaagagactttgtgtaggattagtattatcccttaaatgtttgacagaatttaccagtgaaatggagtctggagttctctttgtggaaagatttcaagttaagaattcaagttattaggccgggcgctgtggctcacgcctgtaatcccaacactttgggaggccaaggcaggcagatcatgaggtcaggagataaagaccatcctggctaacatggtgaaaccccatctctactaaaaatacaaaaaattagctgggcacggtggtgggcacctgtagtcccagctacttgggagactgaggcagaagaatggcgtgatcctgggaggcagagcttgcagtgagccgagattgcgccactgcactccagcctggatgacagagcaagactctacctcaaaaaaaaaaaaaaaaaaaaaaaacttcaagttattaaatagatataggactactcagattttctgtttctcttcatctgagctttggtagcttgtatcttggaaggaattttccaatttcatctaaggcatcaaatttattggcataaaattattcataatatttcctgattatattttcaaagtctataggtattctagtaattgtctttcttttatttctgataccagtaattcatttcctccttttctgcgatcagtctagctggaaatttctaagagtcgttgatgttgaaaaaaccacctttttcttcccttgatttttctctattgtttgcctattttcagtttcatttacttttgcgcttgccgttgttttttccttctttctactattttggatttaatttggtaatcttttctgtggtagaaggttgcacaattgattctagatcttttctaatatcggaatattggctatacatttccctctaagtactgagttacctatgctcagtttttttggtatgttgcatattatttcactcaaatgttgaaaatattttatttatcttctttgacccttggattatttagaaatgtgtttgtaaatttctacatatttgggttttgaccaacatcaaaaggtcaatcattgacttttaattccattatgatcagggaatgttctttgtattcttttaaacattttcaatgtattaatgcttgttttgtggcccagcatattgtctatcttggtagatattccatattaactggaaaatcatgtttattgggctgttaatgggtagaatgttttataaatgccaggttctataaatttaaccaagctgattgatagtgctattcttttgtatacatactgattttctttctacttgttttatcagttatgagagaggaatgttgaagttcccaactatacttgtggattgatttatcttttcagttgtgtcagtttttgcctcatatattttgaagctttgctcctggatgaattcacatttagggttgttatgtttccttgatgaactgatgactttatcattatgaaatgttcctctttctccctgttgatgttctttgttctgaaatttattttgtccaatattaaggtacacctaccttggaaagaccagttttagttgggctttattgttcactatgacaactctgtcttccagttgaagtgtttgtgtcatttatgtttgggttttaagtctaccatcttggtacttattttctattttttccatctatttgttgttccttttcccctttttctgccttcttttagtataattgaatattctttgacattccattttatttctactcttgccacataagctatatctattttatatgtgtcttctctgtatacgtgtatttaccatttatagggctcttcatttctttgcatagattcacatttccatttggtgtcattttccttccatttgaggactttgctttaacttttctgtagtgtatttctgttggcagtgaatcctctcagcttttgtttgttgaataaacttcattttactctcatttgggaagatattttcactggatatagaattttggattgacagtttttcttgcagcactttaaagatgccattctatcgtcttctggcttgcaaagtcagaactttcttttggccaggaactgtggctcatgcctgcaatcccagcactttaggaggctgaggtaggaggattgcttgaggctaggagctcaagaccagcctagcacaggcaacgtagcaagaccccatctcaacaaaaagtttaaaaaattggctggggatggtggcatgtgcctgtaataccagatgctctggaggctgaagcaggaggattgcttaagtccaggagttggaggctgcagttgagtcatgattgcaccactgcactccagcctgggcaacagagattgagaccttgtctcaaaacaaaacaaaacttttctttgattctgtgtacataatgtacacataaggtttttttcttcatttgatttcaagattttttcttgatatcagtttttgggtacttgattttagtgagaggttttctttgtttattcacctctggatttattgagcttcttggttatgtgggttatagtctttatatttattaatttttcaatcattattattttttgcttctacccctctgcccagaacttcgattacatgtattaacccagttgatcttgttcataagtcattgagtttctgttcatcattttaaaaaccaatctttaattaattttggataatgtaaatgtagccatgttcattaatcttttcttctgtagtgtctagttcaaggataagcaaatttttttctataaaagatcagatagtaaatattttatgctttgtggaccagatggtctgttacaatcacacaactctcctaatgtatcacaaacacatgcatagacaatacaccaaaaaatgagtgtgccagtaaaactttatttatgacaacaagctacggtctgggattaggtctatcggccatagtttgctgaactctggtctagtccactgttaattccatcacatgtgaatttttaattttaaacatcttcatttctagaaatttcatttgatttaaaaaaatatttgatatttcctctttcattatgcatgtttttaaaaatacttgaataaaattatgatagctgattgaaaatccttgattgctaattctattacctcctcatttctaagtctgtttctgtttagtaattttccaaaaactgcttatgggtcctattttcctttttcatgacaattctagtaatttttgattgaatgctgggtattgtaaaaattatattgtggagcatctgaattttcttcctttaaagaatgtgtaatttgttacggttgacagtcaagttacttgttgctcatagtgatcctttcaaagactgtctttaagcgttgttagggtgggtttaggatcaccttttagggtctctgcctaaaccccaagggatcaacaacatcttttgactctgatagttggaaaatcaaatgaatgctaaccctatgcgaatgctgggatctgttcagctcacagtttcagagttgctttttgcttagcctcatggagttttgtcctcacatctatgacttagtattcagcaaagactggagggtttccctcttcagatttctggattctttgccctgcagtgtctagccacctcagactccctacattccagactgtttcctcagctcagtgagacctttgtgttctgcttggcgcccccactctctgcttcacgtttcagaatgaacctccaggcagaaagctggggcagtcgtgaagctcacttggtttgagagaagggagcccatctctcaggcattacagtcttcactgtctgtcgttgaatactagaaatatttgttttatatttttccccagttttcaagttgtttaaggcaggaggataaatttggtccattttatttcatcattgccagaagtagaaggcagtcgtcacctttttaaaggtgatcatttataaacaggccgaaaaatgcagttctgtaggattaaagggaaatttcagtttgagtttttaaaagtgagacagttaataggttatgtaggtaagagggcactttgcttctgtgcaaacaccacagagtatgctgctgagttgctctgattaaccctaaatttgtgaatttaagcttataaattaaattctctataatgtatttatcaagtgccaggacagagctattatggtttttctatgctttgcattggcttctgcaaattaagtttcatttcccttttgaccacaaagaagatggccctattcaagacttcctcgttcataatgcctcagtttgttatccctccctcttccctcttcttcctgtacttcctgcttctcagtaatgatagttgttcttgtgatctagtagagtggaaagagcgtagtatctgaataagaaaccagacgttgtaattctggagccacatctgactctgtgacttgggatgagacactccagccctcagcatctgcttcatattccttatttatataattggcacggccatctgtgtgtgtgtgtgtgtgtgtatggattcaaatattttaaaaaggatgtgagaactctttggaaaccataatacatgctgtgagtgtaaggtgtttttgaggtcactgtgaatttcctcactgagactcaacctaacaatggaaatgtcttcttgtcccactaaacgctcctgcagaaatacccagcttctgcttggattgagaactgtcactttctgacacttcttccttatattgtattgatacaaggtttcgggcagtttctgctttttgtgatagctgtgctgttggatctcacacttgctctatcaatctgtatctgtaaccaggagacagaaatcacgtagtaatttgaataactaaagttcaatataagaaattattaaccatagtggaattggagtaatgaaggattggctagtaagaagtagaactctaaagaagataggaatagataataagatacagctaggtgtgctggcgcatacctgtagtgccagctactaggaggccaaggtgggagggtcacttgagcctaggagttcaagaccagcctaggcaacatagtgaagcccccaactcaaaaaaaaaaaaaaaaagagagacaagaaagtacccttagggctgagatagagcacttgaggaagacatcgtcccggggctgagatccagatcttgttgcacagagcttgactgtggttcactgaatggcatagaaattgtttttgtgtcatgaggatggtggggaagtctctctggtcctgtgctggtagaacttgctggaaacctatcctctggaatttgccagaaatccgccctctagggtgccaagggaagatgtgggagatatctcactggaggcgctccatttagaaactccccgaggtgtaggaggtggggatgctggagaaagtgctggccagtgggtgctgttgtccacaggcactgtaggagctggccctggagaaggcaggtacactgcaggagtgtgctgagtgagcacagtacaaccaggaacaaaatgctttcttcctgttaaagcgtcacactttgccagttgacaaaggaagaatatttataaggcccacattcgtttcacagaacaagcaaacagggtgtacttggaatggagaggtaatcagtgtataactggtacacctcatggctactcagcttccatacgtcccttttgtgtgaactcctgtgtgtcataacaactgtctctacctagcaagatgcagctaacttggttacaagtgaagaagttatcaccattccccaaaatgaggagacacacagtgccaagagtcaccatactccttgctggctatcttaattactcctcaaattcatcacactcctgtggaatagtctgttatctacacactaaattgtacttcagtaagttaactatgttaatttcccacaacttgtgtagaagatcaaaatgggaaggagagagaagaaaatgactaacacatttaaataagatgcaaagataacaggcaaatagaaaatatgcaaagttgctgcagccttcattttttaaattggtcaccagaccatcattgacatccgtggcttcattttttccactatctattttatgtgtcccctgctctcagccccatcacctgctgttcaggcttcttcacctggtagagggacccaaaccttccttcctcaggggttcaaatcttcagttctcctgcctggttttggttgctgtaattctctattaacctttactagaagccatggaaataataagagatgcaccagaggatcacccgggttccagacctggcctctttgcctagattgggtagaagcaacccggttgccctgtgctaatcataagcaatcacaacagacagtagattaacccaccctttcctgcctgttggtttggtgacataatgggaccaaagtgtccaggtgctcatcccgtgtttaaattcggtggaaccactgctttatagcctggtggaagaatccccatttcctcccttggggaccaagatctccaaaccagtgggcttaaagttgctgagacaggaatgaaatattctgtgcattgtttattagcgagaggagccaccctcactttcaccctttgaattctggacccacatattgtagctgtgagagaggctgcaccatatatgggtttctggtccaaagcatatgctgcattctatgaaacagaattctactcttcaggttattttgttccaactggcgctgtaacttgggtcttttggaagcctttctacttttcagttagggcagccacttctgggtgacaaggaaatgtcaaactcctccttggcagttcttttttgacactgtatcgatagcaggtttgctgcagtttctgtatttttgttacagctggcctgtcagttctcatacttacctgctttccagtatgacttgatgtgtgacatcaggtaaatcctttcctctctgtggacctttgagtctccacggaagagtgggaggtttagacttgatgatccttgggaaactttccccttctaaagcattcttgctccagtgaccctgcagggtgagggtgagctcagttgggatggtgcaggtgaagtgaattgtgaatgctaagggctgtgcacgtagcagggttgaggtatgatgtgttcttctcactatcagtggttgtgatcagcgttcgactttgaacctacctggagctgaagaaagggtaccggccccccggttcatatcatcatgtctctgtttcaggacccctagaggcagtgctcattctgtggaggtgggggaagggacaacattgtggagagaaggctagaaaaggaatgaggaagaggttgacattcccagtctgtgtcttcctgtcccctctttctctgctctccctcacagaggctcacacgcacattctgtctctctgccatccaaacagatgcagctgctctggagtcaaccagacttaacgaggagacaactcttctgctttcttccgtcttcttcctacccaccccctgacctaatgctgtgcttgcctgttacagcaggcctaggaggaaatgcactatgccttccctgtttttgttttgtgtgtgttttgagatgcagacctaaaaatattctgctgtataatcggttatccaatcagccatgcgaataatcactgtgccagagcctataggaaatgaggcaggagcctgaaactcagaagcatgccagctttgccttgcctttttttctttttttttttaaatgtgctcccttgggatctgggtttgagggttgagataggaggatatgctgggtgggtttccatggaggcaggtgcaggacactgatggtatgtctccctggtgggttgaggggaaagaatggttggtgtcacagtaggagttttgcacgtagttgaggcagtttgacttatgcctcttgaacctctattccctcctctgggccttgcttccagatgctgcctccctcccccagcacacctgcctggaatgttctctctcctcctctctgcttttccaagtcctgccgatcccctgaggtctagccctctatgttgtcagcaggaccaaccattcatagcggctgttgtctcacgatactcactgttgatagcagaagcatccagctcccatacctctgtgtagggcttgtgtttccagagtcactgtgtgctctcctctccactgtctcccccaattctctccaaagccctccgatgtcagtgggtggggtggaggtagtgaggggaggcaggaggaggtaggtagtttagtgtttaggctaagagcacaggtcttggagtgacagatttgctacttccatgtaacctctgttaaattctttaccttctaagcctcagtttcctcatctgtgaagcactgaaagtagtattttcagtttcataaaccctagggtttaggggtgttatgacaattaagtgacgcattgcctgtaaagtacttagcataatgactggctcctaggcaatgctcaacaaacatgaggtatgacattgtaattatcaccatcccactttacagctgaggaaaaggaagtgtggggagcatgggcgacttagttcacttgtacagtaattgactacccagcaaggactatgggtggtcaactaacaggattattcagggctggctctaagcccaaccaagtgctagatgctgtactggaacagtgactcaggcactcagctagggacgcagctggggaggtagatatttacatgtgagcctcaaatgtactgggggagatggaatggaggcatgtgtgcagtggaaagagccctggacttggagaccaaacagaagccctgtaaggagagtcacttgtctatcatttccacccttttgtccccagcacccaggccaagcccaggtatgttttaggtgctccatcagtctctgctgaaggaatgaagaggagccccgagccacagctctggctgggcctctgacctggggaaccttgaacagctctttgcatccaccaagtcacagggacctcctcagtacagggaggggttggacctgtagggacccgccagctcttgtggtcccacttggtagactcgacagctcctagcagctgcacagtacccagtgtgtgtctttacctcagttgtgcttttggagaagcagttggagaggtgagggcatgaagggctgggctgacgggcaccaaggtcgcccaggtgctggcagtgctgcagacagcatgtagctgtcctcagatggcccaggtctggctgggctctgcaggaacacttcagctcatgggcagcctggatttgtgctgatgcggagacttccctggcagccacagttgctgctgttgctgctgcctggtcagagttgagggctctgacaacagccaccacagctcgcggtctgtccactgctcagaaacctcacacaagaaaacttctgagactgcctctgaggccctttagatcctgagagccccacactcacactgcagcctccccaaatacagccagaacccacccgcttctggttttccatgtggaccatttattgcacctgcccctcctctaggcatagcactgcactttgggctccacccggtcctgctcagatgttgtgctccttaaggaatctctgctcgttggtcagactgactgttttcctccaagagtgcactagagtgtacttgcttctgtctggcgctttatcatctgtaaggcagggcactacagtagttgacgggctggctttgctgttgcacagactgagattgaaattctggccctgctgctccctagctgtgtgacctcgggcaagtcacttcacctctttgacctcaatatcattattggtgaaatggggttaataactcttaggtcctagggttttgtgggatgatgcacttgtacccctttgcaggcagcccttacccggcagcccccactgccaacgtctctgttgtgttcaagtctgtttcatgagccagtgtaacctccctccatgcagaaacaacgctgtaaagtattagcataacagtaggtccattgggcagaaaccacaccaataaaacgggcacaccccacagtggctctgatttccacacccttcccaaccccgcactcccaagccttgcccagggctttccatggactgagcctcagtagaaagaggttgaattagattttgaattttctcatgcctcctgtctcctggccctcagaaaattaaaatccagcattggaattagtcatggaaaaatccccattttctttcctttcattcctctgtgaagatcataggttcaggttatttctttgaattaattggctaagcctcagtgaaacatgggtaatttacctggcactgtgaggtgctggaaattataaccagtgctcctaaatggatatgcagcaaccaagcaccttcatggtgctgatgggtttgtcctcacagtgctgggagatggctaagcgggtgctgtggctattaccatccttactttagaggactgggactcaagccctcatcttgtggctctaaggtgaatgtcctttccctaacatgtctgaccttctccttcctcggcattgggaccctgggtaggagggccagtagaagatccctcagcagaacttaactggccaccagtccagagtggaaggctgctgcttgtttaaaattttaatccctttctttaagtgtgaagaatactgggcaagtgtaaaagaagggaagacatggtctcttccaaccagaaatgtataaactcgctgcagtgcctaggacacatgcgtctttattgaacaaatagttattgaatgtccgcttggtgcctggccctgtgctaagcattggtaatatggtggcaaaatagaaaagatacctcttaggcttctggccatgggcacagacagttaacaaggataatcaagttacagattgttacaagtgctatgaagaaaatttatgaaaaattaaatagcaatgtaagtaggacacactaaaataatacactaagtatcatgtatcagctctggctgcctccctctctttaaagcagagaagtccaggctctcaggggtgcgacagagccaggacaggtgtctagtgagcggcctttccatgggcagtgtgtatggaggggcctggaggtgtgggagtggccattttagaagggtgttgagattaatttctaccgttagaacccagttctcgtccatctctcttttcttcttctttgtttttgagacagggtcttactctgtccaggctggagtgcagtggtgtgatcatagcttattgcagccttgaattcctgggctcaagtaatcctcctgcctcagcctgcccagtagctaggactacaggcacaccaacacacctggctatatattttttctgtttttgtagagatggggtctcacagtgttgcccagactggtctcaaactcttgcgctcaaaggatttcccctcttggcttcccaaagtgctgggattacaggcgtgagccatgattccccacctggtccctctgttaaagcagaactcacagaagaaagcccaaaggaacaaaatttgtactttcatgatgtgggaacatctcttccagttgagaactctctaaagcatttgcaatcatagatttgtgtaagaacttgatttgcaccctaaattttgggatgtatttattacataagcagatatacctggatttgcataacagaaaggactattttggggtgacttatgacagatctgctatgtgaaagcctccaggaacttttagcatcagttgagacctgggggaaacagagaggaaggagcgtgcaggcactgaggccagaggaagaagggatgtgcctgtcctcagtggctagccatgacactgccagaggagcactgagaagggagcaagaagagcacttcctaagtggcgagaatacccagctgcaaacaaaacctcagacacagcctgaagctctgtgtccttttgtgcagccccttccttaccccattgagtagcagcttggagaagagctttttattacagatgacacctatgaatgcaagtgagggaaaagaaccgactaagccagagctgtgaattcccagaaatcaatatggacgggactggggatgcagctccctcagcttctctctccatggcccctatttgaggctgaatctaggaggccctgtgtttttgatacagtgtctcactctttttctgaggcacttttcaaaatttctgtcccagtgctaagcctgggcgagctccacagagctaacctgtgtgtccagagccagccctggctgtttttccagcttttccttatgccaatagtaagattagggctggggacagtggtggcgagagagtcaagtgtgtgtttctcaaaagttgccttgggagaggagtgaggtgaaaggaatcaaggcaataagtgtaacataggcttaaacatacttgcatgaagaaaacaaaggacttaggtataaacaaatgtttctaagacagggcacaaaaagcaatcatcataaaagtctgatacagtaacttcatcaaaatcaaaacttgtgttcatcaaaagatgctgttaagaaaaagtaagtaagccactaattgggagaaaatatttgcaaaacatctatctgatgaaacatttgtacgcaggacaaataaagcatccatgcaacacaataataaacaagcgagcgatttttttaaatgggcagaaaatttaacagatatttttaatagaagatataatggccaagaggctcataaaaagatgttcaacattattgttttcagaaaaatgcaagttaaaaccataggacatgctactacacacctaccaaagtgactaaaatgaaaaagctaataaaactaatgttggtgaggatgtagaacaactggagactcttaacgcatcatcggaggggctgtacaatggtccagacactttgggtaaactttttttttttttctttttttgagacagagtctcactctgtcacccaggctggagtgcagtgacacgataatctcagctcacggcaacctctatctcctgggttcaggtgaatctcctgcctcagcctcagcagtagctgggatcacaggcgtaagccaccatgcctaactaatttatgtatttttaatagagacagggtttcaccatgttggccaggctgatcttgaactcctgacctcaaatgatatgcccgttaggcagtttcttataaggcctgtgacccagcaattttattcgtaggtatttgcccaagggaaataaaaacatgtccacaaaaatatttatacacaaattattatagcaactttattcataataagaaaaataatgcggccattaaaaagaacaagatcatgccctttgcagggacatggatggagctagaggccattatccttagcaaactaacccaggaacagaaaaccaaatactgcatgttctcacttataagtgggagctaaatgatgagaacacatggacacagagggcaacaacacacactgggtccttttggaggttggagggtagggggcgggagaggatcaggaaaaacaactaatgtgtactaggcttgatacctgggtgatgaaataatctgtacaagtttacctgtaacaaatctgcactcgtacccctgaacttaaaaaaaggtagaaacagcatagatgtccgtcgggagaatggataaacaaattatgatatattcatacaatggaatgctactcagcaagaaaaaggcatgaactgtgatagagggaggtaacataattatgttcaatgaaagaagcctttttttttttttgagacggagtcttgctctgtcacccaggctgcagtgcaatggctcgatctccgctcactgcaagctctctgcctcccgggttcaagccattctcctgcctcagcctcctgcatagctggcactacaggcgctcgccaacacgtttggctaattttttgtatttttactagggacggggtttcaccgtgttaaccaggatggtctggatctgacctcgtgatcagccggtcttggccttccgaagtgctgggattacaggcgtgagccaccgcgcccggccgaaagaagccttaaaagagaaagcgcggtgtatcaaaactcactaaatgccacatctaagatttatgcatttctcaatgtgtatattttactttaaaatactcataaccaaatattaaactctagatggtgatatacatgtgtcagggtttaggggttgagtgtacagaggtctgcaccttcttttgaaatgtatctaaaaataagatagattgatggatgggttgagggatgacaaggtgtgtgataaagctaggaaaatcctagttgcacaatttaggtagtggaattgtgggtattcactgtacaattcttgtagcttctctgtgtatttgaagatgtttgtaatacaggttggaataaatatgctcaagtggaggatgcaagttgcagtagcatgaagggaagataattatgatttatcaccctttgttacacagtgctattttgtttatcttctttaaaattccattaaaacccaccacaggagcctttgcaatgtagctgatttatcaaattcagaagaatacttccagcgtctctgactcatttgatcacctggatacctttgagttaatcttccagccacagctctgattctccccttttgactgtgatcatcctgaaggtgtttccctcaatgctgagtgcttggagccgctttagaattgctttcactctctgttaatttggagaacaaagaatcaataagtagaaggagattgggaaattagtgatcggggacggtgcagagttcataaataatttaaaatatacagagttctggcttttcaacagagattttaataaaagatgaacaaggtcatcttcttccttctgatgaaagttacccatctgtagtgccatggcggatgctgtgtacaagagctgaaatggtggttcctgttaactttgagagctttggacaaaaatgccagatacatccttctagatagcaatatcaggcgagcctttgagtggggaggggaagttataaaccactgtagagaatcacagagtgaaccgaggacagagattggatcaacactccattccttttctgttttcttggaatgaagtcagagcaacattgttttcatttttgtttgcagtgaacctaatttttgaactgatctatgtagtaataagcacaggaaaggaaaagtggaagaaaggagattcagcacattagctagtgaggtcttgcgtgataacgaagacaacacaagcctgagccctcctggctagtgaggttggctctgcctgcctttgcccatcccaccaccttctcccgtgctgagcctttcccagccagacagtgttttgaggggcctttactacccctctccctgccagccccagcctagctgtaatcacccatctggaaggcgtgttttcctggcatttacctcccattatatggcacttcacttgggaagtgctccaacagaggcactctgctgtatcccaagaagccctcaatggcattaccgtaattctgtttatatgacgcacccccaaattcttgagctgtggctgtgacagaatcagtaattggaaatagaatttctgtgatagtcactgagttcccccaagtattaggcctgggagtggacttgtccaggtggtatccgtgggattgtgtaggggcaaacagcgatggataccctgttgatatactgagagatgctaagaaatccaaagcattccagtgacagcgaacattgcattgatagaatagggatgtaagaaggctgattaattgccacatttgataaagggttggagaggggatgaagggggaagaacgtgtgtgtgtgcatgcacgctaaggagtaccacgatagtttgtgtgtttcttccattgttttcagccctggataaagagggcccacctgtctccaaatccctggtagcaggcagagctcagtacagtaggctatattgggtatagggcatctatgaggcaaagaccatatctcactcacatccgggtcttgaggtcctgacattgagagtgtgccctggaaagagcaccgaaggttagtgagggcagctgcgtctgagcactggtgctgatgctggtgggatggactacagagtctgtccccactacctttggaagagctacccaattaaaactgagttggtggaggtattcccactgtgtctcccacaccttctctcgagggttcagatatgtcgcgttctgacttcccagcagcctgcatcatgcctcttgtctccagcacttccctcactgtgttcttgctctactgagtactctcagctgtgtggttgctttaggacccaagcggtgctgttccctcccctaggaagatgtgctcttctgggatttgggagcattcatgacatcgttctctgtaccaccctacaagcatccctttccctaccaggtttgtaatatagtcaacttttagggagggggacatgtgttcatttattgttttattaattattaagtgcccttgctgtgttgggaatagacaaggaatttgccgaaactataatccataaccacccagatttctattagaccttcatgttcatttacagataggacttaattttcttaatcagttaccaattgttgggtgactggttccctgttaatgtatggttgggtgagtgggccagctgggtatacagaggttcagggtattcaatgcagaaaggacctgaagatccatggaggtcatgtggtccaactttctgccttcagaggaggagtgtgtgtggggtgcacatctgagaaaatttacagactaggctggggtggggataaaggagagtcttatctgtaggtctgctgctttgggtttctttagattagcttagaagctggaaactggccaacgaaatgcacagaattgctggaattctggagaagagtttgcaccttactctgtactttctaattaaaagggggacccctcagaggtgattccgattctggactcccactggtgtagtgtggcaggttgagtttgccgccccgggcacatcccctcatggtcagagggatgaagaggagggggtgaatgtcaggttccagaaaagcctgctctaaagtcatttcctggtcatgctgatctggaaatagctgagaactgtgattgagacccaagttttgcccccaaagctagctttatatatggttgtagcagtcaggacctaccagatggaggggacctgtgggatagggataacaggtgccgtgtgcattggcacacaggagggcaagaggggagagagggaaaggctgcgaggggaaatggagagagaaaggaggctcttaggaaaatccctggaggagggaagacttctaacctgagccgaggccctgagccagttcctctgattttttttttaaagtcaaacatggataaagtcacactcaggtgtcactgtgaggggaaaggtggagaaaagtgactgtggtttcagtttcagctttagccaccatcttggcttatgatgttagatcagttcttgcctctctctgagcctcaatttacctatctatattttattagttgaggaatcctgaattgtaacatgaaatggttgtatgtttccaatctctgcttttacctgtgccttgttggatctccctctccccttcctagatgacctcttgggcagacttcccattttcagttaacgaaacgtcagtgttttcatctgatttaagactccttcttgctcctgccttgccactgtagtaagggggcgtgggctgctctccctacctctcagctctgactcctccattagtgagaaggaggcagagggataggagcaagtacctttatgcttaactgggcacaagagatgttttcttcctggttggtttttgcagcttctctagctgaaactggccaggcagcagcacccttggtctgacaggcatctacgtgcagattcctgctgaaattctgtggagacctctccacctcacaggtcccaatagggatttgtggctctggttcagccactctgatccctgctgcacagcctctggttgctagagtaaccttgcatggtggccagttcccctgggtgagatcccagagagagctcaagcctagccaccctgtggggcccacttaacttgcaggaagctcatgggtctctgccaggtcaaaaggtagcatggcgactgtcctagcacaggcgagcggagcagcggttcaggactgtagccaaagctgagagttccctggggtctgaggtgctagtttatccatcttgcaaacgtgattgtcttgatgattctcttaagtccccgtttcttagatctaggaaggggacctccctctagctgttatcctcttccacaaggctgccaacatgctgatgctgtgttccctctcaagcctcactagcctgtggctgtggatgggtggggggtgggggatggtggaaaagggatggttgattataaagggctggcttagtgagccctgggctggggagatgtctagttccatctgttggtttcttagaaaatgaggtattcaggccgggtgtggtgactcatgtctgtaatcccagcactttgggaggccgaggtgggcagatcacctgaggtcaggagttcgagaccagcctggccaacatggtgaaaccccatctctactaaaaatacaaaaattagcccagtgtggtggtaggcatctgtaatcccagctactcaggaggcagaggctgaggtaggagaatcgcttgaacctgggaggcggaggttgtggtggccctgagatcacaccattgcattccagcctgggtgacagagcgagactccatctcaaaaaaaataaataaataaaataaaataaaatgaggtattcagttcttgttttcagcagggagccctgtcttctctaatacctgggtaacaggaagcagtcacccaactctcctttatgtacagaatgaagaattttatcataacccacactactataccttagatacacacataagcacaagtgtcagatgcagaccctgtgccttttatttgtgttgtctttctgtgcttttgctgttctctctgtggttatttgtcaaagtatgagggtaacttcttgtggaaggacagatgttaagtattctttaaggccattgtaagctccccatcttccaaaccttagagagtcaacacacactgttctgagtctgctgtgtgcttacatcagtgctgacagaccaaattatagtactccctaacccaattctaaaggatgaatgccatggcacttaaagtattttgcagaaactattattttaacttattttcacagtggctatgggttttttatagtcttgtaggaactttggttaaatacagagtaaaaactgaagctgctatgggaataatgagggatcaggtccttcaaggtcttaaaaaaaatctctaagtagcagtttcttttgtgcctgcaattctgaattgcagtgtgtccctccagacaaagctgagcgccatatgtgactgtgcctgtttgtgttttcgaaagcctcagcggtcactgccatttcagtgcctgcaagtcttgacaggaagcagtggtaaaagactgtcagaacctgtttgtaaaaatgtttgtgtttgcaaagatttttgctagtattccatgcatatcttagctattaagcaaaaatattataccattcatcttagaagaaggaacaaggctaggtaatcactagcattctcttttctttttctggcagagaactgaaagccaagagcattctatctcatgagcactacaggtctagggcaggggtgagcaaaccttttctgtaaagaattgaatagtaaatattctaggctttgtgggccgtgtggtttctgtcacggctactcaggtctgctgccacagagcaaaagcagccttagacaagaaaacaaacgagcgtggttgtgtggcagtaaagctttatttacgaaaacctggctggtggaccagaggccataatttgccaacccctggtttagtgaaaagaacaagtttcgagttgtcaccgatggttgaatttagcccaagatggtagctttgcttgtctgattaccttcatgccaacccacattttctctggctgacactaaccaggacagaagcctaggctggtcttccattttctcttaagaaagtgatcagtttatgggattgtatgcactttacctcacccacagcagatgttcaggaactgagtatccaacataggataaaatacagaatgaaagcatcctttaacattgagatgaggttgtggtgaaggggaggagttagcagtctgtcactggggtgactttctggggagctctaatcagtcatgtgtttctgctagcagcagcatcccctcctcattcctcatgtggcatacattgcaggtcttcctggcgcagatgctttctttgctcacacacattccctcccttctttcgtttttctccccccagcacacaatgctgctgctgccacacaccatttcaccccatgctggcccacaaagaagacagaggttgatgacatagcatgcaacttcagaaagttcaccactttgagccccgatgtataaatggtagcagttggtactaactctgccagtgcgttcaaaagtcatcataaggacaatgtgatatttatttaaatacatattgcattgctgactgacagtgtatttgcagtcattatccatttctagagacaagttcatggcaagcatggtaaaaagctggacctcaggagggaactgaggacaaagtaagccctgatgactctcactggcctcctgctgcacctgtccttatatttgacctgttaggttggttactttaaaaagccagttacggggaggctcatttaaaaagacataacacctgtgaaagattattttaacgtggaatatatgactggacaattatttgccaatctgatgaagtagggccacaggttttgttttcattattctgtatctactgatcagcatatccacttgcttgcacaggctacacctataatgtccacaacttccagttgcctcttatgtaacaatagaacaagaacataaagatacagaggaaagctgagagcaattctaaatgtctatggttttttctttatctcttgttgttatacatccatatctgattcaacaataaaacatgtaacattgcttatccagtacttccaatggattcagcctggtgttttggaagaaacaactctttcttttgcactcgtatctcattatttgagacagtacttaattaatttaggtagttactaatccaactgacataaacttgggaaccaaccaccaactcctgataagcaaacagctcaactcttggggaacaaaaacgtgtaagctctttagaaattaacaagtcatgagagttcagtatggcttgggcgttagtcattaccttttagccagagggaacaaagaatgccagttcaaatgacaagttggttaaaaggaaatctgacagcttctagagtgttggaaaagaggtcaagacctgagcttctaccctcaatggctcaaacaggcataccttggagatatggttggtttggttccagactaccacaataaagcaaatatttgcagtaaagtgagtcacacaaatgtttttgtttcccggtgcatatgaaagttatgtctatactatactgtagtctgttaagtgtccaatagcattatgtctaaaaaatgcacataccttaattaaaaatactttattactaaaaatgctaatgatcatctgagccttcagcaggtcataatctttttggtggtgaggggctttgccttgatgttgatggctgctgaccgatcacagtagtggttgccgaagaaggctggggtggccgtggcaatttcttaaaacaaggaagtttgccacatgatagattcttcctttcatgaaagatttctctgtagcatgggatgctgtttgaccgcattttacccacagtagaacttctctcaaaattggagtcaatcctctcaaaccctgccactgctttatcaactatgtttatgtgatattctaaaccctctgtttcatttcaacagtgttcaccaggagtagattccatatcaggaaaccactttctttgctcatccataagaagcaacccctcatttattcaagttttatcttgagattgcagcaattcagttctaccttcaatcttcacttctaatacttattctttgctatttccaccatgtctacagttgcttcctctactgaggtcttgaacccctcaaagtcatccatgagggttggaatcaacttcttccaaactcctgttaatgttgaaatgttgactttctttaatgaatcacaaatgttcttaatgacatccagaatggtgaattcctcccagaggttttcaatttactttgcccagatctgtaagaggaattgctatctatgggagctggagacttatgaaatatatttattaaatcataaggcttttcagagtcaaaattactctttgattcatgggctgcagaatggatattagcaggcatgaaaaccttcatctccttgtgcatctccatcagatcaggtgcattgttagtgagcagtaatattttgaaaggagcttttttctgagcagtaggtctcaacagtgggcttgaaatattcagtcagctgtgctataaacagatgtgctgtcactcaggctttgttttccatttatagagcatagagtagattgagcatcattcttaagggccctgggattttcagaatgataaaggagcattggcttcaacttagtcaccagctgcattagcccctaacaagagagtcagcctgtcctttgaagctttgaagccaggcattcccctctctagctagaaaaatcgtcgatgggatctccttacaatagaaggctgttttgtctacatgaaaatctgtttagtgtcaccaccttcatcagtgatcttagatcgtctggagaacttgctgcagcatcctcatcagcacttactgcttcaccttgtacttttatgttatggagatggctgcttttcttaaaacttatgaactaagccctgctagcttccaactttctctgcagcttcttcagcctttatagaatttaagagagttagggccttgctctggattagactttggcacaagagaatgggctggtttgatcttctgtccagacccttaaaacattttctgtatcagcaataagggtgtttcactttcttatcatcatttgttcattggagtaacacttctaatttccttcaagaacttttgctttgcattcacaacttggctaatggtttggtacgaaaggcctggctttcagcctgtctctgctttgaacatgcctccctcactaagcttaatcatttctagcttgtgatttaaagtgagacatatgagtcttcctttcacttgaatactgagaggctgttgtagggttattaattggtctaatttcaatgttattgcgtctcagggaatatggaagcccaaggacagagagagagagatggagaacagctggttggtggagcagtcagaacacacacatttatcaattttgttcacagtcttctatgggcgcagtttgtgatgtctccaaacaattacaatagtaacatcgaggataagtgatcatagatcaccgtaccagatacgataaaaatgaaacagtttgaaatatcacaagaattaccaaaatgtgacacagagacacaaagtgagcacttaactgctggaaaaatggtaccaatagacccgcttgttgcagcattgccacggatgttcagtttacaaaaaattgcattgtctgtgaagctcaataaagtgtgaagtacaataaaatgagatattcctgtataataataactattgtgtgcatactatgtgctgaccattgcacattatctcatgtactccttttaaccgtgctttcactgattagaaaaccaaggcaagggctgggtgtggtggctcacgcctgtgatcccaacactttgggaggctaaggtgggcagattgctttgagctcaggagttcaagaccagcctaggcaatgtggcgtaaccacatttcttaaaaaaatattagcctgtgtggtggcatgtacttacggtcccggctgctcgggaggcggaggttgtaatgagctgagattgcaccattacactccaccctggggaacagagactctgtcttaaaaaacaaaaacaaaaaggctgagttagagaagagcaaagtgcttgcccaaggttatatagcttagaccgagtggggattttgaactcagactgcttgactccatatttactgtgctctccagcttagggcaaactggtagccgggaagtcatccagctcaatttcagcttgcctcctcctgatttcctggatgtctggtttttaaaaagttaatagcaaactagtatagtgttggctccacagacgtgcttttcagaacccacctatttgccctttactggtaatcaggggtaatcctgtcccatatctgtaccctgatatgtctgggttgtaaaaagtgtaagactggatggtacagttaagctatttgttctggatttgggttttttaagtttggcatttgagcagaatcacaagttgtagaaagtagtaatttccagacatttgagatctgattcaccaacattactgtaattaaagaaaaacctatatttgtttgctccgttttgtctcactaggatgttttataaataataaacctagacatttagaaaatagcatctattcagctggttaagctttcgtggcccttcatgttcagatgtctcaaggtgatatgagtgtgcctcaatttatagggagtgactatggatggtgaactatattgacatataaaggcagctttaaaatacagactacagaaatcaagtggcttgacaattcccttagaacatatgtttatgaagtatagagctcaaatgtaatgatttcagttggttacagagtattaatgaattttgaattgaggcaattgtgatcaagcttgttgccttttctaacatgaatcattattaaaatgatgattgtcctccatagttatgaaagcattaaaaaagcatctacctatgcctgaattaacgggacagatgtggttttcagctttcacctggccaacaggacttccatggttgtgatttcaaggtgcttgtttatgtatatggttttgctggtattttctgagtcttcaataccatttcttgtaatagggtgtgaatgggtgtgtgtgtgcttgctagtatgtccccttggtccttagcattgtgggaatgtaaagtgaagctgagtaggatgtctcaatgtcctagaatcctccagcctttggtttttaagaggtacccctgtgcgagagctcgtggaggcccttctgtgtaacattcacaacacaaccaccacattcagtgacagcaggtgctgagtgcaaaccgtgtgccaggcatttcccaccatcagtatcaatcctcaattccagaaagttggtactgttgtgaccattgagaggatgaggagaccgttgcttggagactttcagtgccttgcctagggccacacgatggaaaagagcagaaccaggaattggactgctcttcaccatcctcatggctgcctggagggcaggcagtcttgggcttccttaaaagatttttgttttgggagggctcttcactgtctcaagaaagctgagggaagaattcgtctcatttagtggatgaggatacaaaaacatatgttaaaaattacagcctcgggctctgtggaccctgttcaggtgccagagggcttttctcctatattgagcacctttgccacaaagaagctagaggaggaaccctcccccgatttcaccttgtgagttacaggtgtctgacagccctgttcttagctaagaagtgtgtgtgcacctgactgcaaacagccgccatgcctgctggaggacacatgtgacacacagtttctggggaccctcctgggcctacagactgcagtctcgggtgggtacccatggcccaggacttcacattcctcacactgccctgccctgcttctcttctgtctgacctgatgccccaggcttagggtggggaggggatgctggtgggtgggttgtcattttcctgtcccagtcaggtattttgtattgtttctcaatgagccatttcccatctggatttgggggggatcagggaagatgggtgggttatgagttagtttgctgggcatcttcccttttttctctgtccagctcccaggtgtttgaggctttttcctgcctccaggtgctccaaatgtgggggctgccctttctctatctgggtttcagcctctccagctcctgcaagacagtgctgttggatctctgtagtgcctcttggtttggccactctgggatttgtgagtcatagtcttcagtttggtgctttttcctactccatcctgccttctgctattcatgccccattgcaagaacaggcattcttccttcccgtataaacttgcaacctggttccacccattctcctctcttcttctccagatagtcgtagagatcgctgcctcccaaaatagccccatttgattccttaggacaggcaggaaactcgctgcccgaccctgcctgagtctccgtttccttagctggagagactgtccttgctctagaaaccaaccaccggaaattcacctccatccctatcacttcctggggtagttctttctgaccattgggtttgcttcttgggtgtctggctctgcatacagttagaagctctttaaataccttttaacttcagggtttttgtggatgtgtatatggtggagggagagagtgtataccagtgagcatgagagcaagagttactatttatcacaactggtgtccaggggtggctaaagattatcgacttctagagttgtgtttttcaactttttttttaaatcttagtgagcagtaataaatacattgtaactctcaagcacacataaatgtcatctgaaacacgtttgaaaaatatatgcgatttatttgttttttgagatggagtcttgtgctgtcacccagggtgcagtgcagtggtgcaatctcggctcactgcaaccacggcctcctgggttcaaacaattctcctgcctcagcctcctgagtagttgggactacaggtgtgcgccaccacgcccggctaatttttttgtatttttagtagagaaggggtttcaccctgttggccaagctggtctcaaactcctgacctcaagcagtccggcctgccttggcccccacgaagtgctgggattacaggcattagccactgcgcctggccgaaaactatatactcttatattctgatatttcctgtgcaatgtgatattttccatacaattttatttcatttttcaaaaattgctggatacaaagcactgaattaatttcatatgtattttatttaaacaatcctctctcctccattacagtatacatttcatggagacaggaattccatgttattctacttcctataattgatgcttaatacctattgtcaactgattcttttctctgtgcagatcctctggagaaatattttgttctgtgccaagaaacagtttcattcaacggttaaggtgacttgtgtcactgatctgatttccttcttttacattaactatcaaaaatctcagacttattaataaagacatgtcttcacaggatacatctttacaatggtcttatttttattttattttcctcgctctttttttttcattttaccttattcttctgtcctaaatatttaaagtttcagctgattttaaagtaaaagatgctcaatgggaaaagctcacacaaatcagagctacctaaaagtagagttggaaagtcccaaggatctttttctctgaggcaagcctctttgcttctgggtgcttgccctgcagactggcttatgaagaggtcaccatcttttcagattccaggggcctgtaatgttcataccactgcagtattcgtattacacactgtaataatctggaataataagatcgtaggcactctttcttgccctcacatgtggatctgccttctccttttaaacagccatgtaacgttccctttctcacctactttgaatttttatattcttgctgctctaaggttttttttttggagcaaggaaagcaatttaaaacataaaatttactttcaaaagaagagtagagataattaaccagcccttgccacctaactcaatataatcccctagtaactcctcttggagccaccaggttccctgggagtggaattgcctgtggaaaggcctgtgtgggttctgagcttgggaaatggtgacggagccctctctctagcctctgggaggtgtcaaataatggatgagagtgaccttggactggcaagagcaggtcagtgcaagtgacatgggtttcttagatactcctcagctcagtgtgggtctcccgagactcagttctgcctgctgacttgctcattcatttccattgcagggctgcagttgggtcatgcctggttttttggcctcccaatgtctcttaattaacttaatattacttggtaatactaaagcaatgatgaattatgtgcatggagtcattaatcttctgtgtaaatatctcaaacgctgtgtcttaattatagactccatacttaaaatattttaaagcttctattcatatatttacttagaaaggtatgatccgtgtttctatggtgtcggcacactcagtgggaaaatggtgtccatacattggagacgttcgtatgaaagagtagtttctctgatgagatgagtgctgcctgttctccactgacccacagacattcttagccttagcaatgaatggagttggggtaagattgggcctggggatctgggccctctttcaccttctgactgttctgtctatagcaaaccatagagagtttttctggacagtccaggaaggtgtaagagcagctttagatgaggcagctgtctccctcatagcagagccagccctaagccagggcagggcctcctccgggaagaattgtgcacctccttcagggtcatcagtgagttaggtacattgtgagtatactaacttagtatttagcagttactctgcaccgggcaccatgctgttcctgggtggtggctggtggctggggcagggcagtgagtgttacatagactagacacagcagtaatagccaatgttccatgagaacttgccatggggtttgccacacgaagacactggctcttgtttacataggctgcctcatttgcacttaccaacaaacctgggtagcttctggtgtctgtattctcattttacagtgaagaagctgcagtgaggaggggtaaagtcacttgcccaagtctgcatagctaataagtggcagagccagaacctgagcccactgtccaaggtgaaggtgcttcctagcatggtggccacctctaggtaggagctcagctgtgccacccactgggacagatacactcccaacagctgtgattgggtagggtggctccacctcccagatgggtcctcggtttgctgagtgttggttggataacttgactaactttctcagcagtcctttgagcagctgaggtcatacttagatgtgacttacgtgagacaacagaggagtccaggtgagagctggcaggcatgggaccagggtggagttgtagttttccccaccaggtgggtggagccaggtctcttcaaaccagagggcacaattgctgtttgtattgttcacgttgactgtagcaaaaataactcagtgcctgtgaacctcatctgtgaaatgtaaataaccccttctctgcctatttgttttttgagacggagtcttgctctgttgtgtaggccagagttcaagaccagcctgaccaacatggtgaaaccctgtctctactaaaaatacaaaaattctccacctatcttactctgtagcttgggaaatcaccgagataagaggttggaaagtgataactgtccaggcatgcaagtagtatgtttataggaacatgactgagcaacagggaaatgagatttctctctctctctctttttttttttttggagatggagtctcgctctgtcaaccaggctacagtgcagtggcacaatctcggctcactgcaacttccgcctcctgggttcaagtgattctcctgtgtcagcctcctgagtagatgggactacaggtgcatgccaccatgcccagctaattttttgtatttttagtagagatggggtttcaccatgttagctaggatggcctccatctcctgacctcatgatccacccacctcagcctcccaaagtgctgggattacaggtgtgagccaccgcgcccggctgagatttcatttttaactcagacgtcaatcaacgtagccatatacagatttgaaaagcttttctttatctctgttaatggagaaaaagaatgactgctttcttgtcaaaatgaaagtgttcagttttaaacttaaccagttcctgccattttgaaatgttcactcatttcttacttttttttttttttttttttttgacacagagtctcgctctcacccaggttggagtgcagcagtgctatctcggctcactgcaacctctgcctcccgggttcaaacaattctcatgcctcagcctcccaagtagctgggattacagactcgtgccaccatactcagctaatttttgtatttttagtagagataggtttcaccgtgtttggccaggctggtcttgaactcatgatctcaggtgatccacctgcttcggcctcccaaagtgctgggtttacagccgtgagccactgtgcccagccaccatttcttactttttggcaaaggaagtagacatattggagggttgacctgaactccatagattcccagggagacagtgtatgactttgatcagcccatgtagggcacattcccattgccatccaattttacctgagccattgggatgggatgcaaaggcctgacatggtttagaaataaagcataactctgcagtgccaactaggatggggtaaatgggattctggcctgggtgacaactaagacaagattgctggcccaggtgctgagaaatgtagcccgagataatggttctgtttctccttttgtgtagagatgggatcttggaatctagtgaggtgaagtacccagctctctgctttggtactgtgaggggattctgcagaggtagatggaatatggtttttgtcctcaaggcactgacaagctgcaaatgatacgagacagtgtatcaataggttcaccttcccaacccttctctgctcttgtacttggttggtgctcaattgtttgttgatatgatttaccttcatgatgacatgtcaaaacatgtgatataatttttagctctggatggcaaacagtttcaacttggatgccaactctacccagtgggtgctgcctgaatggcaaaacatgtgacactgcctcagggtgccaggagaaagagtgccgtctgatgaccagtgggaatgtctgttatggccgggggatgggggttagaagcagcaggcatgtggtggtcattggttcatcctaagtacattaggctttcaaaaggggaaaaatgatgctcagaggaaatgaaactccttagtcttcccttaaagggtgaagcaggatttagacaaacaggagtgctttcagtcttggaaaagagcagacgtgaagaccgtaccttccagtgagtatgcagatatgtgggaggctgtgggagctgagggactggaggcacgtggaggaggaaggggcatcaggaggggcaggggcactgtcctcgctggacccatgacagacgtcagttggttgttggtaggttgagtgtagacagattgcagaggtcctcggggatgccagatggaggaatttagatgtgatgcagtcctgtgcttctcaagaagccttcccagatgctccggacacgattagctgctccatcctctccgccccaaaggagactcctagtactctgcttgagcttggattcttgtctgctgtcctgaaatgtttatatattatctgccatcctccttgaggatatgaacagtgttgtagccatctttgaatccccagtgctcaggatcatgcctggtatggagcagataaccagtgagtggtgttgaattgagctgaaatagggtccctgaactgccaggcgagatgggatggaagtgggcagtgccttagaggtgaagctgggtgcggaagtgggaggctgccaagcatagaatgtaccctctgccaagggagctcagagtccatgtccctgggatgcacgggatgggaaggaaggcaagtctgaagcgtcaagtttacaagagtgtgcacagcacaggaaaccagttgaaattgaagatggcaacagagaacggaaaagattgaaggagggaatttggaaagctgagcctagatgaattcccagaggcagtgacttatagggctcggaggccctgtgtatagggaaccaccgctgaacctgtgggtcagagggagtcatcaaagatgttgtctcttgagaaatgaggagctactgaagattctctctctcagatacctcaacattttagagacatggagtgatcctacagcccattgtattaatatttaggtgggactccttcatttgcaggtgacaaaaactgaacccaaactagcttaatttggtggcttttataactgaaaagcccaaatggggaggggaggggagagaagggaatttttgacttcaggctcaacttgatccagggatgcatacagtggcctcagggccaggtgcctgcttctgagtttcgctggctggctggctgactggcacactttctcttcattttttggcttggcttcccttggtgggtgttagctcttcatctctatgtccccctggcaactctaggcttgtggtctctcagggctgaatccagccaacaaaagaacttcttacctagttaccccagggaaagctcccagacttgctctcttcggacccggttggtgtgggttggagcttatgcctatccccgaaccaataaccttggctgcatgccaactcttattgcccctgggatgagagcaggaatggagcagttcctgggggaaggtcagggtgctgttacccttggagttttgctgggtggcaaggccatcattactgccccatccaggctaactgttgtagtcttggcagcaaagcagaagctgcctttgctctgccggtgaggaggagagctccctgccagcctctgccgccccaggcatgctgctgccctcttcccacagaccgcatgtccttgaagctgggctccgtagagtggtccaccaggtcaccctgctggccacctccatttgtcatccctgggcacattctagacagcatcttgggccagggccttgccccacctgggtgattgtggggtcactgaactgtcgtgggatctcaggagaaacctcttcagagagtctgcatccacagggagaagtgtattcacacttcccacaggctggggagctgtctcacctatccttagtcagggcgagccttccattgtgaggtgctttatagtttgcacagctctatccaacttgttacttaatctggcttttaccataacactggtgggcaaggcaaagcaagaatgattgtccctgttttatggatgaaagaactgggaatcaggaggggtaaatgtctcaaacggggcaacacagctgtcgagactagcattagacttgggggacacaaatgtcacataaaatgtgtacttttaaaccgaaggtgaagaaagatgagggcaaacagactactgtagccagtttcttcatgtaaatgtggtgttaaattacccattgttgttcctctaagtgcatacttcattaatacctgcaggggaaaaaatgacctctatttacagccaagcatctctgagccgacgcctgcctgcccaccagcctcctgtggtttacccaccaaaattttactagaggttgaatcggcttgtagaagctgtgtgatagcgctgcggctcccctgggtcacctcctgaaacgtgtagggtcgtgagtgggagggtgtctcagcaagcccagcctgaatgtgcacgatggcctcaatcgacccagccacttgaaaaagcagccgctgctctcggttcttgctgttcttgcttggtcagctcttccctggggtctctgcgccctcacagagcctccctgtgaagcctgtccttggagactttgctcaccaggtcatagacaattgttgttttccaactggaagagatcatctgatttagtctgttcatttcacacatgagaaacgaagaccaaaccccgtaccgtggcacctggggccctttgtgtctgccctccactgtgtccctgcagcctgtcccttcccttcccacctgtcctcataccttgtgcttcagccatgtggactgctcttcgccctgaacagcttgccttcgtgcaggctcctcttctggatggaacaccctgcctggagcagggagggccatgatgagggagcaggtggctgtgctgagcctttccctgacatgcactcatggatgttttcctggaacagagcaaaaccagggggcgctggtatcatagaacttcttagtgggaagggacatttaataatagttggtcaaaacctctcattttgcccatttatttattcatttataaatgcggaatatctatttttgtgacaggccttgggaatgcaatgatgcatgaaatagaaatgatctctggctttaaaggaatgataatttattaggggagacaaatattaaagaggcaatttttaaaaattgacaaatagctacataattagggtgtacaacatgatgttttgatatatgcatacactgcggaatggctaaattaaactaattaacatatctattacctcacatgcttatttttttgtggtgagaaaatttaaaatgcagtcttagcaattttcaagtatgcaatacattgttgtaactatagccactatgttgtacaatagatctcctgaacttactctttctagcttttgtatactttgaaattttttatatgttgatcaacatctccccaatcttcctgacccccacctctggtaatcatcattcttctctctgcttctgtgcgttcagtgtttttagactcctcatataagtgagatcatgcagtatttgcctttctgtgcctggcttatttagcttagcatagtgtcctctaggttcacccatgttattgcaaatgacaggatttccttctttttaaaggctaaatagtatttcattgtgtatctataccacattttctttacccattcatccattgatgaacatggaggttaattccatgtcttagctattgtgaataatgttatgaagaacatgggcgtggcagacatttctttgacatactgatttcatttcctttgtatatacattcccagaagtgggatcactgcattatatggtagttccactcttaattttttgaggaccctctgtaactgttttccatagtggcagtactaatttacactcctatcaacagtgtacaaagcttccctcttctccatatctttgccaacacttatcacttgtctttttgacaatagccattccaatgaatgtgaggtgatggctcattgtggttttaatttatatttccttgatgattagtgatgttgagcactttttcatgtatcttttggctatttgtatgtcttcttttgagaaatgtccgttcaggtcctttgcccattttaaagtcagattgttttcttgctattgagttgtttgagttccttatctatttttgatattaaccctttatcagatgaatggtttaaaaatattttctcccatttcataggttgtctctttattctggtggttttccctttgttgtgtgtaagcgttttagttagatgccatcccatatgtttattttggcttatgttgcctgtgcttacagactcatatctcaaaaatctttgccctgtctaatgtcaagaagcttttactctgtttttctgtagtactttcactgttttaggtcttaatgtttaagtctttgatccattttgagctgatttttgtatatggggtgagagaagggtctgatttcattcctctgcatgtggatgtccagttttaccgtaccccttattgaagagactgtcctttccccactctgtattcttggcacctctgtcaaagatcagttgaccataaatgcctggatttatttcttggctttctgttaaagaggtaattttttaaaatttaaatttctattgtgaattacggctgtggaaaagtataatgggctttgacagcatgtaacagcaggctctaattttgtctgggaggtcagtaaaggttttgctgagaaagtgtcatttaagctgagccttgaagggcaagcagagtgtagtctgatgagaaagagggttggggagactgttttagaaagaagggaacaggatgtggaatggttccactgtggcccagggccacagcatgaatcagtggctgagttgggactagcagaaatcagatctatggctccaagccctgtgttccttgcattcaaccccgctgggtgcgtttttggccctgtatcacagagctctatgcttattcatctaaagagggaagttcatgtccatggggcaggcacccttggtggataaagcagggacggcaaagacatggaggtgggaaggtggctggcatgtgtgggagggagcaggttggcccatgacttggagtgaagcactctgacagaggagaggtgggaaagttggaagaggaatctaggcaaggatgaaaggatgagatccttaaccaagaagctgcaggttgggatagcaggggaggccaggtgagatattgagatcagctgttgtcctagcagtttgactctttatttcaggcttgttctaaaaagggtttatggtaacttagatacatacatatgtatcctgttttttgtttttgttttttaaatacatatgctaggatcataaaacctcatgctgtaatagcctctacatgtctagatctatagctttattcctttcggtttttttcttctctgctttctagtagcacctatgagtgccttacatatgtctgatgctacagttaaagacacaaagagagggcccctttcaatagagaatccaggactgcagggcacagaaggaatggaaggtgtcagtgggagagggggacttctggcagagtataagccagaaagccttcccaaagccttggggcacatgggtggaagagcaaaacagagaagtgactcttacctggctgcatcaagcctctgttcaccttttgacagcagcttgggagctctgtgaggacagggttctggctttgctgagaaggatgcaggtgctcggggatagatggatagacagatggacaagtattcatgccacagcactaataagaggattcttaaaataggaaaggaaagtaccaagtctaatgaaggattttggcatctcccacctcctgctagttgacagtttctgtttctcaagattctgtacagcattaactggtttggagattattaactagtttagagactactgatttagagcctctcctgttggtgaaatttcactgtttaaagaagacacatcaggttttagaattagatttcagcctttgtttctctagtggcttgagttctcgtgggcggggtagggggagggagtggggggacatccgtccatatacagggtagtttctggacgttgttttctaaaggaaggtttgactggccctgcctactcaggatctcctgccagggagaagaaatccctgctggtgggtgactgagtgccacaggtgtgactctgcctggcacacagagggggatgagatgcaagaatcatttactctttccctgtacctggggaagggctgttaaggtacagctcctgctcaggccttttataccagggacgcctcatttcatgtatggttctagagggttcctgctggccccttcttctgccatcccagtctttcatccttgacagtgcttcttcctctgtgcttccatcagtcgtggccacagacctcagtgtcctctatgtgtcacctctcacctagctgttttggctgggcccacagtcccaccttgcctgttaggaacctgactttcttgttggcttccttttcaaattgttaattcaacattcttttctcaaatgaacaatccttttgtaaggcgaataattatcccacttctcctgaacgacgttttgcaagatttaaaaataatacttcatttgttgaatgtggagggatacctgtttcataggattcctttttagtggcaggattgaggaccgggatgacattggcttctagacaaactggtctgcctgctctccaggctgtgattgttcagttggcatcatggtagaatctctgtaataaagaattgcattaaaggaagtttgtatttcttatgaagaatcccatcaaataattcactaaggattttggaaagagaaaccaaattctttaaaaagcagggagagggcaaaggagaaggaaaaagaacgttaaacagttcatttatactaatggcccttgtgttattgtggcaaaatttcttctaaataaaagtcagagaggaaaaacaagctttgtttgggaggtgtactgtctgttctctgccttgtttttctgctctgaagtatagtgtgctgtcttgacgtaggtatgtaactgctatgaatattgatggcagcaaaagcttttttttttctctctggcctagtaaataaagcagcaaggataaaaagggatgaattgtaaaatcagtgtgctgtttttagcttctctggttcccttagaactcttaagtctcaaacatattgacaatctgcctttggtggtcagggtctgatgtgagcactgtgggttggcattttcagggatttttgcctctggttgaagtaacagagttcctttttctttgagctttcagagttaatgttatggcttcattgaggccttcctgtatctttccctctatccagtggcaatgctggtccctgctcctcagaataccgcagtggcctgagtgtgtgatcgttcctccagcagccacgcctcgcatgcctcccgagcaagcactcctctgggggatatggcagggaatggggcaacggggaatctggacagtaagcaaggaagggcatcctcgtagctctgagcgtggcatttcatgtagctgtatgaagggcatgggggaagaaggcatgggggcatgggatgagcctggctaagaacaggactggtctgaagtctagagggggcatgagtatagaggttggagatgagctaggctttctaaattaaattataaacacactgatgctggctaactctcaaaacacacacacacacacacacacacacacacacaattcgttcactagactgttataatggtgttctgaggagcaaagggagctttggagggcaagtgtttagaaatgacaggaaccacaacagccctgtccttggaaggaagccctgttatatgaccagtgaagagtggagaatgggggcaaagactgggatgcatggccatggctgcatggtggtcaagagggaggatacctgtggcacgacaaagggatgttctgcctggcacggccggtgacagaggggaagcgattctggcagcagacagccggagcccaggggcagcacaggcaaggcttccatttaaatgcacaagggtgttggggatactgcaagcaaacatttaataggtgacggttcctcaaagggtcaggcttatgggaatcatcctaaaatttgtgtttttaaaaatgtttctgaatataaagtgttctcttcagaaacataaaatttattttcaaatacacatttgcctattgcataaaaatatataatagtgataatatatagcaaagtgctttttttccccctggaatccgttgtgaaaaggcaggggtggcctgatgggagggctgaagatagagaatcgctcttgtcagttactacttttgtgactcttgagaaattctctgtgtgtacattcaaaacttccccctccacacacctcccccccacaccaacagactaaatgacaggtaccatagtggggacatttttctggctcctggtacagtgcctgtcatttagaagtggtgttcacgtgtttcctgagcctattttattttgacctcttgccctaggcattttaatgagtgaatttcatgacctccatttctctaaggtattggtaacttttcgggtcccactgatattagtataggactctatagttcatattggaaagttacagttgctgatgatactttgttatttaagtagcttcatgccgaggaatgcctcttgcaaagttaattacacacatctctgttggtccatgtttctattgaaactgaagctgtataaagaaaacatttgtaaaagaggaaggagtcaaagtttttagacttgctgattggtatgttttccacagctcatggagttgcatgggttggaactggaaaggttctacgagtcatttagcccgtgagcagcacctgtgaggtctgtggcagtcagatgggcatggctgctgggatggatactagaggaaaggtcagaggctctgcctaggtttcctgggaaagtgcatgatgacctgtcacaagttcagccgggagaggcggcatgccaataagcaggcagggtgtttgccatcctgaatttacttcccttattgtgtggatgcaaaaacttatatccagaggaggagaaggacttgtccaaggttaccttgctactcagtgacaaagctgactgtgacttcgaactcagacataaacccaagaggaagagagggtcaaaacagatgcatcttcattttttccagaggatgaatttcttctgttcaaagacaccattggaatctttgttgtacccttgtgcttttctgggcctgatttggcaacctcaggaggaaagcatgctgcgttttgcaaatgtgtgcaaataacaaacatgcctgttatgtcctaggcagactcatcacacgcattggggcagttggcaaaatgcagtcatgcagcctggaacgaaaagtgttgcacacgtagttgcttatgagaaattcagtgttagaatgtaaatgccttcctggcccaggggcagtgtaattgttccatttctcataatgaaactttgtttggagggaaatgcttatatgtctaaggtgttgattctaatctctgttcctttttctgtctcctcttcctcccctgcccctgcttttttggtatgtttctttgtttttcttcacaggaaaaagtagaatatgccttcctgattatttttacagtcgagacatttttgaagattatagcgtatggattattgctacatcctaatgcttatgttaggaatggatggaatttactggattttgttatagtaatagtagggtaagtctcttttactttggggaaatgttgatttggaaaatgggaggtggaggttggggggggtggtggtaacaaaacagtctttttagggaatgtggttgctcttttatgccagctgttgcaccagaacctctcaggagttcttttaaggctggtgatgctgctgtcagtctctgggcagatactagtttgaaattctctcgttgttactcccgtttttagtaacatgttatagaagggagtctgaactcctaatatgagaggctttacctaacacggtcttggatctccagaaatagaccaaccctgttggtgattagagtcaaatgagtagagcttttaatacttagtgccaatgttaagttaaaaaaagtaaaaagtaataaaaccttcatagcagtaaggtactctgctatttaacatcccttgagcaaagctattaattttcttttttttttttttttttttttgctgacttgcgggagaaactctggcatactactgttccattttaaataatgaaacaagtgtctggataatgtcacgtatctggcataaaatgaaataagctagaaaatgcagagaagcaggtgttccaccaaaatcctgttgcaggaagaagacatcagtagttttagtgaaaggagaatgttaaaataaaaaatagtggcctgtgttattttagtccttccacacctggaaatgttgccaggaagagaaaaatgaatccatgttacaggaatgctgggtctttggaccaaatacccatgtaggaagataagatatatcctttttcccagtcttagttatgctagctgtaaagtgagttgctcctcaaattatgtttctgtaaatagcctctctgttttcatcttcatgacttcagtgaactgccttttgcagttgagcaaggtgatttttcttgtggattatccttttatcatgaatcttttgccttttcattggagactaattctgctgggtattgggagagtggaattggttgtgggccttcctaggtcctttcaacctaggaagttaatatgagatcctaattgcccagtgggacaattagacttgtgggaaacaagttagcttttcaaaccgcccccgccgccaatacattgtcatttaaggcatcattgcaaaagaagtgtaccaaaatgaacaggtagcagatatgtgccgtactttcctgtatttggtggactctgtcgaggaatggcaagccgaagccttgcaggtatgttggttctgggataatctggctgtgcctcttctgccactggactttttgttcagctaggaatggagatgcttagccccatttcttgcgtcaccgtgctatgatcacctcatatttctgcctggagacatttttcacactacagcacagcacaaggacagggaaccaagtggagcatggtggtcttattgagttaaggagacagacaagagtttggggaggcagaataggggaggggagggagctatttagagaaagagcttcataaatatgccttagagtactcttcagttttggctgagggctaagctacgcctacacggagttgtgagtccatgaggccaggaaagaccactactagggaaaagagaaagatcagggagctgtaaaatgaataataaccagggctcacaaaggactggaaggcattcaaattctgactaattagggtggaaagacctcattgaacaccctggactgtcagtagagaccccacagggccactggtagtagtgctaaactggctctagagcaggggctggcaaactgtggccaatgggctaagtcctagcccatctagcctgccacctatttttataaataaagttttattgtaacatggccacactcatttgtttacatagttcagtttgagtagtttaggtctacaaaacctaaaatatttaaatatttactatttggccttttacagaaaaagtttgccaattgctgctctagagtacagagactacctgaaatccttgcttacaatgtttgaaaagaagtctgaaaagaagcaaactaggctgggcatggtggctcatgcctataatcccagcactttgggaggccgaggtgggtggatcacctgaggtcgggagttcaagaccagcatggccaacatggtgaaaccccctgtctactaaaaatgcaaatattatctgggtgtggtggcgcatgcctgtaatcccggctacatgggaggctgaggcaagagaatcgcttgaacctgggaggcaggggttgcagtgagccaaaaccatgccactgcactccaacctgggtgacagagtgagactccatttcaaaaaaaaaagcaaactgatatgctaactgaactgcctgccagaacataactcaacattctttaaaggaagacaacaaaatccagacactgaacatatgaagaaatgtgacccataaccaggaggaaactccgtcagtagaaacagatcctgaaatgacagagatgatggaattagagaaggacttcacaaagctttaaaaactgctgttataaatttatggacttaaagggatacctgattatagtaaggaaagatgggacaatataaaaaaaaacaaatggaactttaagagatgaaaaatatatccaaaatgaaaaattctctggtttggcttaacctcagcttaaacactatagaaggaaaaaatatcagggaatttgaacatatggcaataacatgaagaataatgattgaggagaaaatgaatactgcctctgtggcctgtgggggaataacaagtggtctaacatatatatatatttggagcctcagaaggagaggagagaaagaggagacagaaaaaaaattttgaagaaacagctccagattttccaaatgtgatgaaaaatgaaactcacaagaagctcagcaaagcctgagcaaaataaacatgaaaaaagccacatcaagcacatcataattgtaatcaaattgttaaaaaccaaagataaggagaaaaccttaaaacagagaaaagaaaatctcagactatttgtcaacaactatgcaagccagaagacaatagagagacatctttaaagtactggggaaaaatgtcaacctaggattctcactcagtaaaatatctttcagagttaaagtcaaaatcaaaattttttcagacattctagagtttcagaattcatgactaatagacctgtacctcaatcagtgttaaagacagttcctcagggctgaaggaaaatgacacgaggtagaaaagtggatctacacagaaagaaatgaagagtaccagaaagtggctctacacaaaaaagaatgaagagtaccagaaagggtaaatacgtgggtacatatacagatatttctcccctcgtttaaaaatttctttaaaggtaattatttaaagcaaaaataataacagtgtattgtggtgtctatagcttctatagaaataaagtacatgacaatggtagcatgaagaataggaacagggaaatagccatatggtcttgtgatgtacttatacagtagttggaatgattaaatattatctgaagatagactgtgatacctttaagatgtatattgtaaaccctagagtatggattggtgagctacaacctgtagaccaaatctagtttgagcctttttttcccccaccattgacaaagtattttatttactgcctactttggcaaataaagcttcattgtaattcagccacattcagtcatgcctatggctatttggtattataatggcaaagttgggtagttgtgacaaaccctatggcctgcagattctaaaatatttactattcggcactttatagaaaatgtttactgacacttgccttagagaagccactaaaaaagaaaatcccaggtctatctaataagcctattgtagagattaaatggaatttaaaaaaaacccctaaatccaaaacaggcaaggaagaagaaaaaaggaacaaaggacaggacaaatagaaaacaaacggcaagttgctagatttaaacctaggtaaatccttattaaaatcattatcatgaagaaaggataatggcctttctttgtgtccatgtgttctcatcatttagctcctacttataagtgagaacgtgtggtatttggttttttgttcctgcgttagtttgctaaggataatggcctccagctccatccacgtgcccacaaaagaaatgatcttgtccttttttatgactgcatagtattccttggtgtatgtgtatcacattttctttatccaatctgtattgatgggcatgtaggttgattccatgtctttgctattgtgaatagtgccacagtgaacattaacatgcatgtgtctttatggtagaatggtttatttttctctgggtgtgtacccagtaatgggatttctgggtcaagtggtagttctgttgttagctctttgaggaattgatacactgctttccacaatggatgaactagttcacactcccaccaacagtgtataagcattcccttttctctgcaacctcgtcagcatctgttattttttgactttttaagagtagccattttaactggtgtgaaatggtatctcgtggttttgatttgcacttctctaacgatcagtaatatgaactttttaaaatatgcttcttgaccacatgtatgtcttttgaatagtatctcttcatgtcctttgctgactttttaatgggatttttctttttttcttgagaagttgtttgagttccttatagatgttggatattagacctttgtctctcattctgtaggttgtctttttaccctgtttcttttgttgtgcagaagctcttaagtttaattaggcccatatgtcaggttttgcttttgttgtgattgcttttggcatcttagtcatgaaatccttgctcattcctatgtccagaatggtattgcctaggttgtcttccagggttttttatagttttgggttttacatttaagtctttaatccatcttgagttgatttttgtatatagtataagaaaagggtccagtttcaatcttgtgcatatggcttgccagttatcccagcatggtttattgaatagggagtcctttccccattgcttgtttttgtcacctttgtcgaagatcagatggtcgtaggtgtgtggccttatttctgggctctctgctatgttctgttggtctgtgtgtctgtttttgtatgagcaccatgctgttttggttactgcagccctgtattataatttgaagtcaagtagtgtgacacttccagctttgttgttttgcttaggattgccttggccatccaggctccttttttgttccatatgaattaaaaaaattttttttctagttatgtgaagaatgtcattggtggtttgataggaataacattgaatctgtaaattgctttgggcagtatggctaattaattgatattgagtcttcctatttgtgagcatggtatgtttttccatttgtttgtgtcatgtctgatttctttgagcagtgtaaaaccatgaaatttatagtagaaaatattggataaaatctttatgacctcagtgtagccagagatgtctcgggacacaaaaagctccagccatgaaacagtaattgaaaatgttgactttatcaaaatttaaaacttttcttcaaaagacagtgtgaagacaatgaaaaagcaaggcacagattgtgaaaaatattcacaatacatacacttgtattcagaatatataaagaactcttacaacccaatagtaagaagacaacccaataaacaaataggtaaaagatttgaacagatcttcacaaaagaagatatgtgaatcatcaacaaacatctgaaaagatgctcaacattgttagtaattagagaaatgcaaattaaaactacagtgacagtactgcatacccactagtattactaaatgtaaaaagactgaacataccaagtcttaaccaaaatatggaacaactggaactctcatacaccacttgtagaaatggaaaatggtataatcactttggaaaaaatgcgcccatttcttacagtgttaaacatagacttaccatatgaccatattaccagttctactcttaggtgtttatccaagaaaaatgaaaacacatgtccccaaaaaaactttattcataatagagaaaaactggaagcaacccatatatccctcaacgggcgaatggataaactcattgtgatgtatttgtgtaatgggatattacagaacaacaaaaagaaatgaactgctgataaaacaacgtggatgagtgtcagaaacattatggtgagcaaaagaagatgagccaggagaacatactatgtgattccatttatatgagttctagaaaaagaaaaaaaaaaactctaccgataaacagccaatcactggatactcaaggctgagcttcaagggaagctctgtacaaggctgtgcaaaaggggcacaagagaatcatttaaaatgttgaaaccttccctatcttgatcatggtgtttgttgcttaggcttatgcatttttcaaaacccattgtacactttaaatgagtgtgttttattatagataaattaaactgcaatataaagtgatttaaaatgcaaaaaaaaggaaactgaagtagaactggactctaagaaaaacttcagaacatcagattattttttatctaaaatatgtatgaaattggagtcaaagaacagaagaaaggttttaaaaaagaaaaggaagaattatgatgtcttcatttgaatcaaattcctactcactacagtttccaactacagtctgtatctcaatccactggatttttccattccaacagtgacctattgcttttgtcaagattcccaatagtcaagacattaagaaagtaattgatatttctaaaatgttaactgttaatgtgaccacaagaggactcagtgtgtctgccagagctgaagttattcctttagagaaaagtttgatctaagccaactcttatcccatgcctccaaatttcaataaagatatatttcaagcattcaggctctattacttaagctttttttgaagaacgtgaaggcttgtatgtgactcctcattctggtgcttctgactttagtcagtttagacagctccttgtcttttttctcccaccttggggtaaacttttaataacaatctagagtcagttactcctttctcatcctgtccttatctcttcaggcccgtggcactttttttttttttgagaggcgtggtggtgaggaacagaatcacggaatattagagtggaaaggtcattctctgagtcgttaaatccagttttgtcattttatagagaggagaactgaggcccagagaaggagagggactttcctaatatctcataactcttaggagtggaaaccagccccggccccttgcagccctgcactgtgtgggaacacagcctgcttctctctctgacttggcctctttggtggcaagagagagacatttttcatgtgttttcaaggacattgctgaagaacaaggaataaagggaccatgatgtatatgttgcaaaacatggatacttgaaagcagtcttcagtcactacctgcataaattactttgctaaccctttggggtgaaaattcctgtggcttgcacatttcagaagagtttgaggttttctttctttctttttctttgtttttctgaagctatgaatttgttttggaggagagacttttcactttagccttgctgcagggatttacagtaatcttttaaaaactatgctgaagagagagaagcctgtcataaatttgatctatttcctcagtcataactagggagagctcaccatctgaagctttgtaaaggtagagaccgggcttgttttccctcctggctgggttcgttgctaattgctgtactgttattaaaacaaagggctgatctataaatgccccagaactacacaactatacccaatcagggctgtaatcagaccacccgatgttttatggactcggtgtcttggcaatccagaggcacgccagtgggggcagtttctgctttgtctgctcattaaactttggacaccttttctttgttgctgggccagtcattcccacaatctgattggccagagttgatgctgtttgaaatgggcaaattttatacttactctgaaaaacgagcaataattccaaagagtatttgtttaaaagagcaaaagtcactgttaaatgagcagattgcctgaaaatagatttatctgaacgttctgagactaggaaaaaatttattgtggctgccaggtacaatattattcacatttcaagagagagaatgatgatattaataccttaccttaggtaactgcctttagcctttgcacagctccttagtatctgtgatttacatcctccaaatatccctatgaaggtgaaggttggggtgtgtgtgttagtgactacattgactacatataacatattaagatgtgagactttgaagtcattcattgattgattcatcagatatttttggagtacttcctatgtgtcagatactgtaataggcactagactagaacagaccacatgcacaaatgagcagaacagactaaaactccttgctgttacagaacctgtgttctagtggggtccacatgcctgtgtttacatgtgttgctgctagttgtgtgaccttgggcaagctacttattcctatcgagtttgttttctcgtgtgtaacatggtgttcataattgctgctgcataacattttgtgagaattaatgtgacaatgtatgtgcagtgcttagcacatagcaagtgctcatgaatggtagccaccaagatggctgttgtcattttagtttgcagcagttccacttgtcatcattgagttcccagggagtcccctcttctttgggaacagacttgctctctgttgctccattgcggtaaaaacagatgaggttaatccctgtcccaatcattttggagatggcgtcgtttgtattccaattccacagcccagttcttgtctttgtcttccttttatttaagcagcagccacacagaattagcccttttcaaaaataaataagattatcatcctgttttgcgtccctggggtaacagactctaacatttctttctctttctcttctttcagattgtttagtgtaattttggaacaattaaccaaagaaacagaaggcgggaaccactcaagcggcaaatctggaggctttgatgtcaaagccctccgtgcctttcgagtgttgcgaccacttcgactagtgtcaggagtgcccagtaagcacttattgtttcctagagtcaggagtgtgctggttttttcttccaggtgggtttcagaatcactggtgctttgaggtgagttgctctgtgccagccaggggtcagcagatgaccatggcctccttcacagttgacaggacactttggcttgcactgtcacgttggatccccatgacagaatgacaggcagttattgtcattctgattttgtggacgaaagaatcttctcttgcagaaagacaaggtgaggtgttggggtgagaccttgggttcaggcctttaattccagtctatttttcctctctggcaacatgctgccatccacgcctccactcccaggcctgcccctctgaaagtggtgggtttgtggatgagggtgttggagtacttagctgcgtgcctttttttttttccccaaatggggagcatcagagggatggactcctggaaactctgattagatcctctactatcaggaactgtgctacccagctctgggggaagggatgaatgcttcttacctggtgacagggcacaggagtacctgccttgaaggctgttgtgagaactgagtgagataatggagggagagcccctaacaggatgtctggagcacagaggctctcagtgggtgagagagagagttttagccgttaggccctaccataccactcagtgccaggccccagtgtgcttctggctccaggcccccaggccaggttaaatcatacctgagttggaatagatgccctgtctgtgccctggccaacagctgcagcctcttatccttccataaggtgtttggggttgcctcactgggctctgcccctgataggactcctgtgttggggacttccatgggtagaagtcctaacacctttctgagggctggtgcgtctgagcaagaatatgggattgcagggtgtgcctgtttttcacaactcataaagccatcagaagaacacagatcacattttttgcctctccagaagttcttcatgaaatttttattaaatttgttggcacttagaatgcaccaaaaatcctctggaaaaaaaaatttccaaatttaacattttaaaatgtaggaagtggtgttttatgtgtacttgtttttccagatggttcatttattttcattgaaaaagatcagcacaagtcaaaaccacagaactgtgtggaatcaattgagaaaaacagaaataccttggaaatgactggctctgttaagtgtaacacgattaaatgagaagttcagtgagcaaacatgttcttccagatttagttgttatagcttaatctaatttcaaagtaaccacgacagctttttcccccaaagagcaaataacaggacagcctgtctatggtatgtgttgtgtgcagactttgggggctgtggctgtgtgcgtgtgtgcgtgcgagcttctggccagtgaaaaatccaagaactcacatagcattgtgtctgcttccttggctaatgaggtttttactaaactagtgcagtgctcctagatattgagaattagttttaaactgtatttcttcctttccccaacagacatcactgtttgaaatttgatagggagatttgtatgtaactctcccccaggtcagcagggaaaaatgtgagtctgagtcttgtatgaggacttttgagcttatatttttaaccacctaggtagggaacatcccagtctctcatcaaactcaaataggcttttgaagaaaaggatcagaggttgtcggatgtgctgtttctagtgctggttggcagccgtggcctgctgatttcttctctagtacttgaagttgttaaaaatgtccaggaatgtttgactgtttacacttatcttggaattgtttagtccctgctaaagagaatccagactgttctgtaagacataattttgtgtgcatgtgtgtatggaaatatatattcattcagtgaaaggtaaatttatttcacaaggtggtgaatcaggcatttgtggagttcttaagcacccacattaagagactgagggagaatgggcaggaaccgagaacccaccctggagaccaggccttctgacccctgtgttgacgtcccccattctctccacagccccgcgacctcagcactactgtgctgctcactgtttaacttcttaccttctctttccctgtccttccgtgttggacagggaaacatttatcaaagttcaagaccatcaaagtggaaaagaatcctaaagatcatctggtctacctgcatcttttagacaaggaaactgaggcctgttggaggtagtgactagtgtaagttctcacagctagtgagtagccagacagaaccagacccacgatctccacatttctgacccggtgttcttcccacttctgcctccttgactagagtcccatgagatccactgagatctaccgtacatgttgattatgtacaaaggagcggaatgcaataaagtatacatgttcacagtcggatacaactttatcatctcataaatgtgacaaatctgaaatacagtagttactctaaatgtaaaaaatattcacaaagcttactgccatggaatttagaagagctaactgctgggggttagttttgcatggcccattggtgtctcaagaaaaccaaaacaatgatagaaacctggccatggggattggaacgggtgtcgtcttttcctttccatgtgttccttgtaggaggtaaaaatattgaaaatcatcctaattgatcatttttgaaaaaaccatgtggacatttacatatccaaagatgtagcacccagagttttagttgtaatagaggttgtagcaaggcagggtcgtgctgagtctgaaatcctcttactgctcttccctcaccatcctctcccctgcctcctcctgtgctgcttatcacggtaaagatttgtcattattgctaagtcttctctttgcttgctgtattctggtttccgatgtaagcatctcagcttcttgcattctttctttcctgactatgtattgggaaagtgagatgatagcagaagatggaaagtttgaaggtggagagacaacagggaaggacagggaaggagaaggtaagaaggaaaagagtgagcagcacagtcgtgctgaggtcgtggggccatggagaggatgggggatgccaatgcaaggtcaggaggcctggtctccagggcaggttctggattcctgcccattctccctcagtctcttggttcctcacaaccaatcctaatcctgagtgctgcccccatccttcttttcatgacctctttttctgtcccttggcgggtagccttacccacactctggcactgagtatgactccatgggtagcttctattaggttggtgtgaacgtaattgcggtttttgccattgaaagtaatgggtctgagtctgaggatttcagactcagcaagaccctgtcttcctaagacctccatggcagcaaaagttttaaatgtaggaaataatcgtctctctctctctctctctcttttttttggagacgaagtcttgctctgtcacccagactggagttgcaacctccacctcccaggttcaagtgattcccccacctcagtctcccgagtagctgggactacaggcgcacaccgccacacccaactaatttttgtatttttggtagagatggggtttcatcatgttggccaggctggtctcgaactcctgacctcaagtgatccatctgcctcggcctcccaaagtgctgggattacaggcgtgagctacctcacaagggcagaagtaatcatttctcatgtgcctgtctctcaagaccacatttcagcttcaggacacgtctaccttaatgttacataataccaacatcatacttaacaaggctcaagtcagtctcaacctcccccttcccctcccacctccctcattcctggagaacctccctttggaatgcttagttttgttggggacactgggattttgcctcaagaccctggctcaaataactggtgtgctccataggtaccttcctctcattctgactcagttgctgagttctggtctcatcctgatcttcaccctcacctaccccagcattcttgaactacctctctgtgtgtctggcctgctgctgtcctgttggtctttctaaagcagctgccttttgctagtgatctaaagtttggcttcatgacctggattcaacacccacaaccctggctgcaatctacttttctttcgtgattttcttttccactaaccaccaatcaagactcaccaccctcaagcccatactgtgctactctcctctgtgcttttggtactctgttcttcttccctgaagttgcctctctcccatgcccacctgtggaaatccaccccacctggcctttgggctgtgcccagagagaagctgcctcaggaccctttcttcaccccattcatccctacttgtcacctgcatggaccttgggggactgaacaaaggatgatgaacatgggaataaagacaaagacaaaagagtatatttggaagaaggggtcagggggctccttgcttctagtgaacaagagccctgagcttcagagcctttcacattttactgggtaaaggagatagggagagaggggagttgttgtcggtcagcagcttgatttacagcagacttgcaagactgcattcttctaacaacaggctctagatgtcccagtagataacctcaatgagcacggtgccagggagtgattgccctcagcaaacctggcggtaggcacagtcgtgagtttgcccacatcctgcattcatgataaacagtttgctgtttgatcatatagcctccagtggaatgctgagttggtcacaatccctttggccttttcaactcccaacacctattaattttaactattgggatatttatatagcatctatgtgctaccccagggtagagttatttgtgtttaattctatgtctcctagaatataattttttgagggaaaacattttacataaaccgtcttcatattgctccaaagcaccaaaccttatgatttccacatggtagatgtttaagagattttgtcagatggatgaagaaatgcataaatgaatgatgaactttgacattgggcagtcccctccctaggccttagtttttccctctgtctagtgagggagtttgactagatgatccttaaggttccttttcagtctatctcacatccaggcttaatattaatgaaaagctttgaaatacctctttgaattttattactatgtgttctaagtaaaggaggcatggttaggaattatatatatgattcattggagtgccttcctggctcacaaacttatttttttttgtctttcctaggtttacaagttgtcctgaactccattataaaagccatggttcccctccttcacatagcccttttggtattatttgtaatcataatctatgctattataggattggaactttttattggaaaaatgcacaaaacatgtttttttgctgactcaggtgagtaatgagaattgtagctaacttaactttaaaatttttttgttttccccaaagcaactttcatggtttggggaaaatctaaaacaaaataggaaaaaaaatgcccaatataccagcacatttactgagccagttctcagtgtgagctatgttcagaatagatgagaattcagtctccctttccaccccgatttcctgtgtaatgtgtcctggcaaacaagataagagacctccaaagtaaaaacatgaggcaaaccaacagcattgtgctatctaagcctaaggaggatgctgtaagcgcaggtgcagaggaaaagaaccatggatgctgacaagaggaaatggcagattccgctaaggagggagcatttgaagggaaccttgaaggacaagcaggatcctgaggcaacgcagatggggcggtagggtgtcccgggctctggcaagggttctcaccttccgctggcttggatttcctgatgtttctgtcctgagcggtacagcctgtttgctctgtttgcagatatcgtagctgaagaggacccagctccatgtgcgttctcagggaatggacgccagtgtactgccaatggcacggaatgtaggagtggctgggttggcccgaacggaggcatcaccaactttgataactttgcctttgccatgcttactgtgtttcagtgcatcaccatggagggctggacagatgtgctctactgggtaagtaccctggggagagagtttatggagtgttctttgcttggataagtgggttttgtgagctagagccactggagaggtggctggaaaagaaaccctgaagtcagttatttgggaagggaagcagatgctgtctttaccagcagtcttcatcatcctgctcctcgagggccttagtttcagttgcaggaagctgctgcgcgatgttggcttctggctttagtcctctacttcccagtgctgcctgaagacctggtgccaagggtgcccagtggtcccctttggaggaactccaggaagccagggctatcctgattcaactcttaagagagccaaagggtcactttccaggtaaggaggctcctggactgccacaggctaaggttaatcatttatacatcaaggcaggttgctctactagatcctaaagggaagaaagggaatgtaaatcggatccctttcatgcttttcataactcagtataaccttaaacccagtgtgagtttctcccatgataatatttcccattctttagtattactataaatcatcccagcacaaaaccttagctgtcttcctttctatttgaagctacagacctctggcagaaagggtaggaatggcacgtagacttccagggctggtggacccatccagcctgccatgaaaacagttggacactctttcaaggcgagggtctgattcctcttgttcctgatagagccagaaagatttgctgtataaaaataagtgctatagcattttaacagccatttcccagggctgagtttgttagaatgcaaataaagctcacagaagtttagaaattgtttttcacggtataagagttgctggtaaagacagctaacatgtagattttgagcctaaatccaagtccaaaggggagtaaccaggattccaatcatgagttgttaaaaggaaattagtaataaagtagttctgaaatcagcagcttttagacagaaggcctgtaaattgataagtagcttctggtagtttctaaattttagatacttttcaggatttcctatactccataacttcaaagaatgtaacatataatggttataaataggtttttgctgcccttcagcagctcacaggattgtagatgtccctatatatttaatatgaggcaaagaagttatatttttatctttaatccccaaagtcagtctagtttgatcaggtttaagcatcaccaacatgttatatcttgtttttcctacttccctttctttttctgattgtcataggagtgtgagtgtgtgtgtgtgtgtatgcatgtgtgtgtgtgtgtgtatgcacatctgttatttatattcataaaacgtcttttcataaagaggaaggaggaaggagatgatattggctgagccaggggcatggcttctgtatgcaggagggccctcaggttaggtgaagcattcatttttgctattatttcctaaattgcaacttctagtcagattagttgagatctcaattccagtcttcccttgaagtttttcataaatagaaaaagcatcatcaaaatagcccaaactgatacttcccctccccaaacagtacataaaacaacattttgatttttttaaaaatcaaaatctgtgactcttctcagctttgtttttctctctattgacatggtgaattgtcagctgcagagccaacatgccttgactgatgaaaaattttatactttatgttatattccttcacatcgattctcagaattttcctgttgccaagcaagtgtaaaacctgggagtagatgattaaaggagagggaacttcaggctcctagaagcaaaagtttccgcttactttcctgagaaggtttaaatatcatctaggatgatataattactatttttattattaatatgacaatcacgtggttaatactttgacagtataattgcactctccataaattacacagcatctttattctggtggggatctcaagccattcataaactttatcccagtctgtatccctttatagaaggtctgggatcttgaagatggagacagtggcgtagagaccatggaacattccccgagttctacagcaaatggttgtggtccttgatctagaacagtggtctataaaccttttcataagggggcaaatagaaaatgtatttggccttgcaggctacatggtcacctcagcaactgttcagcccttccactatagctaggaagcagccatgggcaatacataagcaaatggatgtggctttattctaatcagacttcatttatggaccctggaatttgaattttgtatgatttttctgtgtcatgaaatattttgcttttgattttttcccccaccaactatttcaaattgtaaaaatcatttttagcttgaggccatataaaagcatacagcaagctagatttggtctgcaggtcatgctgtgggaccccctggcctagactagaacccagcactctttccttggcattcttccacctgtcagcagttgatgaatccttccagaacactagggggcagctaagtaatgtcttcccgactgttctctaagattttactctctgaaacacatcaggattgtttttaattacctgttgattgcatttattagctcatcatagagataggcaggggccaaggaaccaagccttcctaatatttcatgggccacagtcagctggaagccacaccgctgtgatacacagcagaacatccctgcccagcatggtgcctggcaccgagcaggcactcaataaacacaagggatggtcatcatccttcaagtgtaccaggcatattgcctcattagtgtagatgtgccatgtttgaatatctatttttatccacaactagggcataaaggggacatcttgggagataaaaagagattagattttaaatattgactacaagcacatttctgaatcctttaggcacttacatatggtggacaaagtctttgcgggtcattgttttgcatctagtcaagtttatattcagtcagcgttctcaagctcatttatgccttgcttctcactagtgtctggaaaatgtctggcagggtcttgagaagggaagtaaaggtgggtccaatatgtagaaaggcacacttagaacaggactatttggatgtgtgggaagtgggatcattaagttctggtggaaagaaacctatggtagagttctttgataaagtgagttccataaatataattgagctgttgtttgactcacatgtgagtgtttgttgctcacagaggcagtagggtgtagggcagggaaagagtgtttatttagcctggttgtgtgaccttgagtagttcatggaacctctctgggcttctcaagatgcagaaataaacttacatgatttaatttttcccttcaacttagaggaaattttttttccttcaattcaaagaaattgtttttaaatgcaggaaataaaaagtattggtttcaggagacagctatccagataaataatttcggtgtcttgtcttagcaccaagctcttttctcagtgcacactcctacggaggtgctggctgtcagaccttcacgggaagtactcatggtcaagctgacagtctccttcattcagggcacctaggaaatctctctgtaaccagccgagggcttgcctttttcttattgcatgctctggggtgttaaaaccagtataccaagtttccagaagtgttttcagcagctagaaaaacagccttgcattggtctataacttgagacatgaatatgcatttcaaccttttatttttattttttacatttttttgagacggagttttgctctgttgcccaggctggagtgcaatggcgtgatcttggctcactgcaacctctgcctccggggttcaagcgattctcgtgcctcagcctcccaagtagctgggattacaggtccttgctaccacgcccagctaatttttgtatttttagtagagacgggtttcaccatgttggccaggctggtctcgaactcccaaactcagggtgatccacctgccttggcctcccaaagtgttgggattgcaggcgtgagctgctgcacccggcccatttcagccttctaaaagaaggaaaactgaagctaaaaagaaaattatttcctgggcaccagatgacaccccttgatgactttgatataagttttttaaaaattagtctaaattgaagtccttcagtggaagccagtttcttcattgttgataaagaccatacaggcaaaatcccaagcagtctctattttcacgtgggtatttttgggaacagcttgcatgttctgatttttcttttgtatatggtaagatccaagaaatgcttggctctgaaaagggacttggattgagaagggttcaatgggagcaagaccgttctcagagccgaagcttgtctctcttgccccaccttctgacttagagatttggaatctccagtggactgtattcatctccagccttcccctccaggcctcaactgtcattccaagtgatacttctgatttgagcaaatgtgaatctgatgaacacctactcccaagaaattaaaagggttttaaattttttaaaggaaaattttccctcccaagtagagaagacagctgttactagagccattctctggaacaccagactgaggcctgaaggagggttggtgaagcagatggctcagcagatgacggttgctagggtcatggaagagtgaggtttcctgatgggagccctggacctgtctgccctcccgtcaccttgttgggcaccttctcccctgctgcatgcacctctgttccaacacagagggaaacaagcccaggtggggctctgtctcaggtgctgacccaggccaggcacaggccaccacaccaggcagccagttccttcttcatatatgggtttttcagtaagtttagtggtatagttgctctggatgaattaccctctgccttcctgctgaaattagtttatccaacttaattagatcaacaattgcagccacagcccaggctcattcattactctaattgccaatgtaagatgtgcagactgatatgagttctattaagcacatcaattttcatgtggccaaacaggtgtttcataagggatttaatgccctctccctagacttcagcaacagatgttaggtaattttttttaatgttcactttccctatttggcttctcgaggcaaacattgtgaaatgcacgagcctcattctgtaaagttaaaacctggagccagatcatatgcaggaaagcacatgcttaacaccctaagggcttgcacctgcaaggcaagagcgatggctctatccagactgtttgcagttctcattggctgaaaattctgggtgttgtggcagggtcataccttgggccatccattctgtcccctgactggttcttaacacctccttcctgggaaaggtgttttgctgaatttaacattgacctgtgctgctggaaagttccatccagctgtgatccttaaagccctgtttgctctagcttcctttggccaggtctgccagggagactgtgtctgaatgtgcagcatgagcttgtccgggaataggggaatggggttcctcaggccacaccctttcacctctaaacccagtcagctcacagctggagccagtctcccaggggggtcatctagatcaaagctaagtgtggagaataagggctgcttctcctttctgtgggtgcagctaagaaaaagcccattccccaaagagcccgtggcttgtgtcagctagttgaccttgaaaaaatttctttttcacattcattttgctgcattcattttgtttgcactcacaggttgcagataatccagatctaaggtgggtttggtttccttgggtaggttggtttccagtagaagattattttaggagtttttaaaaagagtttatagagtcagatggtacaagtttgtctctataattaagacttttccaccatcacaaactttaaacacaaagtctaaaatcttgggcagcatagaaaataggttctagctaagcaggagttttgtcctctaccaagacctttcctgaaaatcacttatcaagacagtttcctgtaagaaaaagccatatcccagctgattttccttcctggggccaaaatctgctattattcggcctgaaagccttgatgactctgtgtgtgtgtgtgtgtgtgtgtgtgtgtgtgtgtgtgtgtgtgtgtgtgtgtgtgtgtgtatggatgcttgtgtgtgtgtatggggaatatgtgattaatgtgtgttggctgctgttgtctctgatttggctactgttgtttctgatttaaatctaagtaaatgtttaattaaatgtatagaatgctgtctctaatgtgaccctctctccttattaaatcctcttattaacccactcctatgagaccatcttatttcttgcagatgaatgatgctatgggatttgaattgccctgggtgtattttgtcagtctcgtcatctttgggtcatttttcgtactaaatcttgtacttggtgtattgagcgggtaagctacacctctttcatcttgaaagcagagtcctgaggacagttgccaagaccacacaagctttgctggatgagggccgccaagaggggttgccagacattttatgtgtcctctgagatgctttcttttctgctgaggcttcccaaatcaagctgtttcctggaacctcaccaggcttcatgaaggagaactatagaacgattattgaccagaaattaatcagcattgttgcttgagatttaaacaatttccatagcatgccctttttttgtctgttctaaagtgagatacatttataattgctttatttgtctggatccaaatataatgcagattaattgttataaaacgatagcaaaatgagctggattgggtgggcttttggtagtccccatttgtagatttcagccgctgagcttgtccttatttgcagaaaaaaaaaaaaaaagggaaggacctaggcccagtccctgtcctaggagcactaaccttcagcaaagcactgagaggtttggcagctgcaactggggctctgctctttagtaaatggataactgataactgatctccttacattttacaggtaaatgatgcgataggatgggaatggccatgggtgtattttgttagtctgatcatccttggctcatttttcgtccttaacctggttcttggtgtccttagtgggtaagcagtcggatccgtgttgcaccttctcctgctgccacgtgtgaggcaactctgcgtgtctcctagctgctccctgacagcttctctgcatgtgtttggactctgatgtcctctcagtgtgttgcttttggattgaactgtgattctttctgcctgtatctgtctgtgagattccgtgtttccaatgcttgccaaacactgttaatttaatgaaaacgttcccccaaagccagttgtgttagtatgtgaacgtgtagaggtggattacaagtgagttaaaggaattccagccttggtctcccccaggaaagaggcttttgtcccttgtcattttgtgtctattagtacataactccttgtcgttttgtgtctattagtacataacctggcccctttaggtcaccacagtgcattataaatacttccaggggagttttagattttactgtgaaggagaaataagcctcaagcacataaatactggacagtttcaaaatcttccttagattgggattctttattagcttggtgttctagtgctgtcattgtgagaactgtccctgtgattcagttttaaccgaaacttacagaatccttctcttaatgcagagtgatgatcgacttttgtgcacacatttcccatggccttacagagaccccgtcattcagtcacgatttttgaagtttgcttgtttatcacttcctctctatggattgactctccataaagagggtgcaacagattctggcctggaaagggaactccttatgttgcaggctctgccttgcccgtagctggagatgccatcccagaacccttgtgggcagccctgcatccacaccgcctctcagacacccccagaaggtggggtgctacagagaagggagctgggggctgtatggctctctcacaatcagctccttcatacagccattgccgggttgtggggggcaggcaggataccaggaggccaagaggggcccacgtctcccagaggagcctctgtcactgcgctgcgcccaggcaccctcaggaagtagtgttgatggatttgattccaggcaagtttatctcctcctcactcactttatcttgctctttccgaggctgtatctcggggaagtgatgtcttcatgtatgctgagttagtgaaaggctttaatcgcatttttggaaacactgccttttccagagcagaaagcagagtgcgtttatccatctcggcttcctttctgcatcttcccctaaacctgccctggattgaatgtagtcagttccacaccagggacgcatactgtcacaggaagtccctatgtagagttggcccaggggccagtgcccgccagagagaggagtgggggctgagcctgggatggggccacataaccctcccctgcctgagccgcctcctgtagatgagtggctcctcaagcctccggcccttccacctcaacgtgagaagtgtctctctcctagtaaacctcagtggccttaggctagggttggacatgtgagggtggtgtctattcctggagaaataacatcgcatttgattttgccacaggagctttctatacaaggttaacagcaatcctgttgtgaattccttggcgcctcatgtctcctaaacccagctaaactgacggaggccatggaaaccactaattttaacagtgccggtgacatcccttatcttttagctttcccaggcaggaaccgttgccccagcagacatgatgaagtagaggcaggagccagatcgtgaggtgcttaaaaaaagaaaagagaaaaagatgggcgggggggcttcccactatcacaaatggggattaaacctgcaactccgtgggaggtacccaaagctggaggataaaaaaggtacactccttcatggaacaaccagtttactgaaatatattttggggggaaataatttttttaaaaaatattttttcatcaaaacaaaacttagatccctgatggaggagactggaaatgacacatgaaattataaaagaaaacccgagacttctctgcgatttttaactgtcagtgcgggctgtgctcaaacccctagaggctgcacatgacctcctctctactcccccagaaggcctccggtagggctggtttgggtaaaggcagaaccatgtctgcaaagcacagcctcgcagctttgttcctgatttggccagtatttcctgagatcctgtagagtgcccggctctggtccagaggcgaggggtgccaggatgtctcagacacagacagcggccttgtgcttaggcgttcattatctcatggggtagcccattttgaagcagtgcagaagggcacatattcagtagaggtgcagacccagaggctctgtgagctgcactagagagatgaggaggcatctcccccggcgactgacgatgggctggcatgcctccacctccgcccctccgccccctcgccctcccaaccaccaccttccctctctgcctgctactcccctcttactttcccattgatatttttgttgttgtttaagcaaattattattatttttttaaattttagcctcaagagtcttcataattttttaagggaacactagaggtactgcaaaaccagaaggatataaatgttgagaggaagacaatttgtgttgcatagaccctgagggactgtcagaccaacacaaatgtaatccgctaagcactgaattaaaacgccctcattttagaaaggctggtcgagaccatgtgattgccttctcacgaggaaatgttagatggtgctgtatgtcttcaagtctgtcagccatttggaaatacctgtatctgtttttgctccttggctccgtcatgtgtgtggccatgccatcctattgtattcttgaacagactttaatctgcacattggatttggtgtttatttgtaaagtgttgtaacactgatgctttgggaaaatctttggttttataacagtcttttttccctcaaggtaagtatgaagtttatgaactgtaaaccctatgcagccatgcatgaatatagatgaatacttccatctctgatcacagtgctctgtgggaggggctgagaatgtctatgtctaatgttgcaatttaaccttaagttgtcattgaggatatgctcccattatgaccaggaattggaaagaatgtcttctttaagtctgcaattcagacatattacacgtggtcttctagaagtttggcaatttttcacttttcaaattgttaattgaactcccttttgaggttttcatctttagaatcatgctagattcccagggggaccatgggggtcatgggtggtaggctggttggctctgcctccttctccatttcagggcccacctgccaccagccatccctatggtggcagtgtctgagcttgcaagatgggggacgccctaggctcccaggatgtggctccaacccccaggaagggggctggaagacttgggttccgtcctgctggagtcccgcgttcactctgggacttcactgagttaccctgagcctcggtctctttgtccttcaggatatcagcgacatcctgtcttgccgtctcccacacagggtggttttcaatcagctaatgactgtagaagtgcttctaaaaatacataaagggtttttctaatttaacatatccttatcttaaatccgtggatatcccccactcccctcactgggttaggtgggaagggtgcagggtactctttggaaattctggagtgtagcattttctggatttcccagcaggtggccacactttacacacacatcaacgttgtactcaatgtcacccaagaggtggctctggagaatgtggaagcactgtgtcagctgcaaagtattacgcaggtctaagtcattgttattatatatttgacaatgtttttttgcacaaattgaggggaacggcatttctattacatagtggttaagcacaccagctttagaatcagacaaccaagtcttgaatgtttgttctaccttttccagttgtgagatttggggcaagttacttacctctttgagccttactttcctcatctgtgaaatggagctcatcacagtagcagcttcgtgaagttcagtgaggactcagtgagctgaagaatgtagagggcttggcctattgaaattatgacagttcaggaagggtgcatctcttcctggatttgatgcaagaaaagaatcgaatcaattcagtcctttcaaactaattaataatagctggccaagataggtctgtgttagtgaaaagcccaagttatatttttaaaatgttttattatatatataatgacataagctactgctgactaaaggatattactacataaaccccctcctgggcttgctttaaagaatagatcaaaatcatttataattcgcttatgaattcaaacctttggttttggcaacaacttatgaaaaatatttgaaatactttgttaagtagatcttgtatgttgttagacaataaatattgttattaaacccactcttatgacataaaattgaatgtaaacccagcccaggtctataaattcaaaatcataccaattaatttgtattcttggtgttctagtaagttccagatcctaccagatcacaggtatcattttaaatcaatccaattttgtattactataggcctatttatctttagaagtttaagggaacatggatgaagcgaagcattatagaaaactgaaggcaattttcaaactagtttatgtttttgaatctcgcctcctacatcccattctggctaattggataccaggggcctagacaaagactcaggcatggctacttttaggaagctttggtttcctaaggcaaagattcatgggatggagaatgtgaagagggaaggtggtgctggtgccggtgtactgtggactgactataccagaattttacatagtggaatcaggtttggtccatttaaattcatactagtaatagccagacaatctctgatttcttctacttgaatggtggctcaagaggcaaaacacaccaatagatagtagttgtattacttgtgaatattttctaagtggagacatatcctctgggaataggcattcttatacatttttcatgactgagattagatttttctctcatttggccaggcacagtggctcacgcctataatcccagcactttcggaggccgaggcagctggaccacccgagatcaggagtttgagaccagcctgactaaggcagtgaaaccctgtctctactaaaaatacaaaaattagccaggcatggtggcgcatgcctgtaatcccagctacttgggaggctgaggcaggagaatcacttgaaccagggaggtggagattgcagtgagccaagactgcaccattgcattccagcctgggtgacaagagcaaaactccatctcaaaaaaaaaaaaaaaaaaaaaaaaaaaaaaaaaaaaagacttttctctcattcaacactttaccagcatctactgacagaaaatggacaattgaatttcctccaatatatatacctctgatatgtctgctttgtaaaagagtagtgtaattgcttacaacattgaaaaggttgttattggggtcctggggtagccaggatatcggcatgatttgtcaccatattcagaataaaactgtactgcaatagtgagttaattccatatcttggccaacagagaatttttggccagtggctactaaggcacacggaagtccagtctaaaagggacaggggaggactctttgtagatagttcttatgattaaaaaataacttcctatgtgttgtagtgatgattaagctgacagaatgctaaagacacccttaatgattacttgtagcaaagtacttccccacatttagctggatttgtctttggtttgaagaggctaatacgtgaaagatttgttcacagttggatgtccccttttctgaaccatgaagtaatattgtgaatggagttgaatgctgaggttagggtgccggaaagattcagggtccttcggtaccctcacatggcttggctttggtagaacaagaaactaagctctgatttggctttaaatgagagtgctaaatttcctttttctaataaagaacctagctaaacatttatatatacttttgaacactgaactttcttgttgcagagttaacagctgttgggggtagctgacagctggatcctggtgctgttggtaccatggtacctgaagtgcacaggctggtagccacacctgacattaacaagtgagtggtaacctctctgccgctggcttacagctactgtttccatagaaatggctgtcgggatcagtggaaacgaggtaagtgaaagttttcgctgatccttgtttccatcaagctgacgtctgtttccctggcaacagcagtggacagcagccaggcgctagcaacagattcagtagagctctcacttgtcagctgtggctatcatctgttcctgaccaagttctttttttttttttaataatgtacagaaagacctctgaggacccaggaggcacctctggccacatgtgccctcctggatgctcgttttgcagatggagagctgtgtgctgagttgacttctctgtccgcagttccccctccacctgtgctctgggttgttgatgtgcaggttagaagagggaggttgttgagggtattagtgttgcaggggaggctgttgaatctgttgatcccaaatcctaggggaagagaattcattacagtgctttcatgcacagacccagctctttataaagctgttgctaccttaatagttgaaattaaagccataattttcctgtggtccctattcaattggaggcattaacaattgccattacttttacaatgaaaaggatatttaggagtttaataatttggcttgtgagaaacaaattgatgattgtctctaagatgctactgtcaacattatgctttttttctcttttgtgtaatattcttttacaggatggtaaaattgcttttacagagatcaaatattggtattgcagggcagcttggtatacaaagaccagtagatctatagtgtagggaactcttccttgttaaagttcaacagctccttttctggatttcattttaatgtttcaacagatggatgcacccaagccctagccctaagtattctccacccatatgagacagcattgatggtgccacagagcaaaggagagccactgttcctgccctggtgtgtgagatgagaggcatggaatgaggtgttggttttaagcccttactgataccatttattaaagagattttctctggaaaaaacaaaacagctttgatattcagagctgtatttttgagactcaaatgaacataaagatccacggtcttatgagaacttagatcggctgctagaagagcattggagaaccatggagttttgtctttggagggctttccggatgacattgttccacagctctctggaaatagggcaactgtgcttggcctgcaggcagttgaatttgatataacagacgaataagaagcagaaaatcctgctggatccttttttctccctctctcttaacttcctaagaatgacttattcatttaatgaattttttttcagttcctacacagtggtagatgtatgccaagtgccctgctaggcactggggttacagtggtggaatgtaggcactgggtaggcaccaggattacagtggtgggatgtaggcaccagggttacggtggtgggatgtaggcaccgtgtaggcactgcagtgacagtgtggaatgaaatggtttctttcttcgtgaagcttatatctaatgatggaggccaaaatgacaattacaaactcgtataaatgctttgaaagaaaggttcatgtgctgtgagagggtttaacaggcacaactgctgtcagtttattgggtaggagcatcctggaagtgaagaatgagtagtccacatatccaggcaaggtgggacaagaagctagggcaagggtattctagtcaagggaaaacccacagaaaggaggtacagtaggaaggagcagaggatgctggaggaactgaatgaagctagggtgacaggaactgggagagctggagatgaagtcagatgaaaggaaagagactggccggcagaatccaggtcacgtaggacctttagactatgtcacaggttttggtcattagctgaagggtaagagaatgcatggatgaattttaagcagggagtgatattcaaatttacattttctaaaaattatgctgtattctcatatcctcaacttaccttaaaatgcttcaaaaagataagatgattaatagatggatagggggatgcagagataggtgataaagaaaatgtagcagctgggtgctgtggcttgcacctgtaatccgagcaattcagaagggtgaggtggaagggttgcttgaggccgggagtttgaaaccagcctgggcgacatagcgaggctttgtctctggtaaaaaaaaaaaaaaaaaaaaaaaaaaaaaaacagaagtctttttagctgggcaatgtggtgtgtgcctatagtcccagctactcaggaggctgagacaggaggatcgcttgagcctaggagtttgaggttgcagtgagctatgatcatgcttctgcactccagcctggggagcagagtgagaccctgtcttaaaaaaaaaaaagaagaagaagaaaaggtagcaggtgttaattatggaatctaggtgaggtaggcatatgggtgttcattgtataattgtttctacttttatggatgtttgaaattcttcctaataaaatgttgggaaaatctgcatatgaaaatcactgtggctgcagtaatatgaatagattggatggatacacaaatggatgtagagagaccaacttaaggctcatataatctgcttccagccacaacatactagtgctaccagactggacctttcaccataaacaactacaaaagactgggcaaaaaataggaagcaactattttcagaaaatggaaataggatatacaggattgcaatccctacgagaagggaaacacatgaggtaaactccgcagttgtcctggctttctgcctggagacagttttagaattatggcagagagggagagcccagcagagaacgatggtctatttgctgaggggtcaaagaacagtgttcagggctgctaagatagctgggattttcagggcagagtatgggtgagaagtatgcagagaaggggctccagtactcagagtggaggttctttgaaatctgaccatatactaagctgcttctgtgccaggtgatacttattgaagccaggcagagaacagctagtagaatgctgtaagtggttggaaatctctccgtgctgggaggtatatggttctgctcagctgtagtggaaggacctaattgaatacattgggtactgagacttcagaaacgccaggctttagggttggagctactttagcccttgagtaagcctactgtagacctgacttaaaaagcatagaaacaagcttcaaaaggatcagggaaatggccaataaattaaacacctgtcaaaaagacaaaaatcaacactcgttaaaggaagagaccaaaactcagatgttcccagaatgtttttcctcatgacccaaaactataagacatgaaaagaagcaggaaaatattcacgatcaaggagggaaaagtcgatagaaacaaaagatgacagatgttgcaattaataatcaaagactttgaagtcactactatgagcctgtttaaggaactgaaggaaaagatggacataataaaagaataggtaaatctcagtaggtaaatagaaacagtacaatatctgaaaaaagtagactggacattgcagaaaaagttgatgagggcttagtgatctctaaaacaacaataagcaatctggtgtatatgaaattggagtcacaggagaataaagagattgaggaagaaaaattttaagataaataaagctgaacatgttgcaagtattgaaaactaagttaacagatccaaaaggcccaacaaacctcaagcaggggaaacacaaagggaaccactgctaagcacatcaaatttagatggctgaaagtaaaagatccagagaattttaacagaaagcaaatgggaaagggcacattacatactaggagaaaataataagaatatgcatttacttgtttgcagatatagtgcaagttgtagggcaatgggtgacatcttcaaagaggtaaaaggaaaaacgattctgtatgaagcaagaatacccttcacaaaagaaggaagtagaaaaactttcaggtaaacaaaatctaagaattggtcaccaacaaatttgcactctaagaaatgttaaaggaggttcttcaggctagaagaaaataataccagatagaaacgttaaatgtccgctttaaaaacgaggagcatggccgggcacggtggcttacacctctaatcccagcactttgggaggctgaggcaggcagatcacctgaggtggggagtttgagactagcctgaccaacatggagaaaccccgtctctactaaaaatacaaaaaattagctgagagtggtggcgcatgcctgtggtcccagctactctggaggctgaggcaggagaatcgcttgaacctgggaggtggaggtcgtggtgagctgaggtcacgccactgcactccagcctgggcaacaagagtgaaactctgtcaaaaaaaaaaaaaaaaaaaaaaagcatcaaaatggcaaacaaagataaaagattttttctcatttctaaattttctaaaagataatttaaagtaagcacaaggtattatgggaactgtaacaggtcaaagtaaattataggataaccatacacagaagatagaaggaagttaaatggagcttcactgtgataaagttactacattttgaaataatatgaattcatggtagactgagaacttaaggatgcatatgataatctccagagtaatgacttaaaaggggtactaaaaagctaaaagaagagataaaatggaatattaaatagtactaaattatccaaaataagtcagaaaaggaagaaaaaggaacaaagaacatatagtaccaacaacgagatggtagacaaacccagtaatatcaataattgcattggacgaaaatgtacacaacattttagttaaaagatagaaattgtcagactaaataaaaatttaagatgctataaagacatggattaaaaataaaaaatggatgaactgtactaatccacacaagttggactttagtataaggaacatttccagaaatagggacatttcagaaatagacattttattctcataaaaaggtcaattcactgagaagacacaatgatcctaaatgtgttggcacctaaatacagcttgagagtacatgaagcaaaagttgttaaaattaagtggagaaattgataaatctagaaacatagatgaaaatttgtatcattccttctcaataattactaggttaaaaacagcaaatatagataatatctagattatatttagattggttaataaattcagccaacttgacctaattgatatttataaaatactgtgttcaataattgcggaatacacattcttttcagagcacgtggaacattcaccgacatagaccatatcttggccatgaaagtctcattacctctcgattgaaattttacaaagtatctttgttctaatggcagtagatttaaaacagaagccaataacaggctgtttataaaccttcccaaatgtttggaaattaaataacctataactcaaaaaataataaaaattagaaaatactttgaaactgataaaatccaactgggaaattgtatgatccgttgaatgcagtgcttggagggacatttatagctatatcagtaaggaagaaaggtttaaactcagtagttctacatttccatctactaatctagaaaaagaagaccaaataagtccaaggtaagtagaaaaaagaataacagaagtaaataaaatagaaaacacaaattataaagttatttagaaagcgtaataaaaattgataaatctctaacaaaactaatcaaaaaaggaaaaagagcaaattaccagttttataaatgaaagaggagataccacagatattacagacattaaaataataagagaataaacttggtaacttaggagaaacaggcaaattccttgaaatacacagcctaccaagaaataaattgggagagtcctatatttgcctttttaaatggaattcagaatcgcaaacagaatcgcaaacagaatcttctctcaatcttctctcaaagaaaattagaagcctagatgaggtcaaaagtgaattatgtcagccgatttagaaaaaaattataccatccctagaaattctttcaggtagtaaagttggagggagcatttcccaactcatgaggccaaaatctcaataccaaaactttacaaagacataataagcacagtgtccttcattaatttggacacaaaaattctcaaatattagcaaatagaatatagcaggatgaaaggaataatatctcatggccaagtgggatttatgccagaaataagttgattcaccattggaaaatcaaataatttaccatattaatagaatgaaagaggaaatcatacgatcacctcagtaaatgcagacattactaacaatattctataatgatttctaataactctcagcaaactaagaatatgcaaaaacttcctcagcctgaaaaaaaaactatagctgacaacatacttattggtgaaagactcaatcttttcttcttaagattaggaacaaagtaaccatttttctatcttcttttattcaatgttttattgaaagtctgaaggtaagacaaagagataaaaggcagaaagattggaaagaaagaaaaaactatttctatttacagacataattgtctacatagaaagtcccaataattgaaccaaaaacctgctagaattaataaatgagtatagcagggtgacaggatacaaagtcagtatacaaaattccattttattcctgtatacaagctgcaggtgttgaaaatgaaattttaaaaaattaccatcaaaaattatttacaatagcattcctaataggaatgaatataagaaaagatatggaagacctctacactgaaaactacaaaacactgattagtaaaattacaatgatctaaataaatgaagatataccatgcccatggattgaaagactcaatattgttaagatgtccatttttctctatgcattgaatgttgtcccatttataaatctcaatagcctttcttttagaaactgacaagcttattctaaaactaatatataattgcaaatgacctctaatgaaaacaatcataaaaaataaagaaggagggcttatactgctgatttcaaaatttactgtaaagctgtaataaatacaatgtttgacataaagatagatgactagaataactgaatggaataacaaattcagaaattcctttatatgttcaattgctttttgataaaggtgctagataattcagtggagaaaggatactctttttagttaaaaaaaaaaaaataagctggagaaactgggtatctgcaaaaagtgtgatgctcaggtcataccagacacaaacattaaacttgaaatcgatcatagatctaattaaaaagctaaacatataaatattttctaaatagatttctgctcttcaaagactagaaatttaaagggaaaccacactgggagaaaatacaacacttacatctgtgtatctagaatatgtgaagaactcttaacaactagataatagatgagcaactcaaaaattggcaaaacatactttacacaagaatgtatatgagtagccagtaagtacacattaaagatgttctatgtcataaaccatcagggaagtacaagttaagaaactgctacatagatagtacaatagctaaaatcaaaaagactatttccaagtgtcaccaagagtacagagcaactgatatgctcatacattgtttatagaaacataaaatgatacaactactttagcaaagtttgtcagtatctcataaagttaaacatatactcaccatatggccaagcaattccatttctagtatttgcccaagagaaatgaaaatctatgtctacaaaatgactagtacatgagcactcatagagccttattcatagtagcccctgtggggctgttggaagcttcagtctccacagactcggccttgggtggaggtccgcccagctggggtgaggcagtgatctggctgcgagctgtgccaccctggcctgtggggtctctgctggctgagggattactggtttctctgttgtagtgaggggagcacaaaggcaggggtcagaagtgctggcccgtgtgcttgctctgtacttacagaggcatgacttctttggtcagtatacttcacgtttccaaatcaaggctttttcttcctaaaattggagcgccccatctctgacttttctcacagagccatcctaataaccaaggagagaaatggatgggaagggcctggataaacgggaagacctttccaagtatgtgggagctccacactggcctggttgtgtcctcctcctcggaggtcatttctgtgagctggaaaagtcatctcatttgcagtctggatgtttatctgcacttctctccagggcctcacatccttccaagacctggagcggcacttggcgcattagcctgatttctctaagtctgactgtcatgagtttggttttgggttcagggataaaacattaatccacagtgaacccatcattccttcgaatttctgctttaaaataaatcttggtttaagttgcctgctggcagttttgggcctctgagtcttggagacccttgctgtgtctgaaggattttaagtcagtgggtgagagtacaccacctgctgagaggtgtactgtccccagaggcccacctgtccttaaatcatggactattacttacaaacaggcccacagacacatgccaagaattccagggcccagtgtagattccagcagctgcactctgtccccctttggctatcagtcaaggatgtttcagcgtcaaacctgtacctatcagtatgccctaggagcacagcagagggttggcaagtcagagggcctcacccaaggaagctgggctccagttgggcattgaaggatggacaggattcgttaggatggtaaagaaaggaagcaagttgtcaggagagtgggacctggtgcctcctgcctgtcggaaccagtgagtgcaatggtgaggctgccagggtgctccgtgctggctggtgagcagtgggcagagcagatgtgcagttgggaatacccactgagagaggcagggtttttttttttttctttaagctgcgggagctgtcagagtgtttgaaataaggtgatggttgacagctgtgcctggaaggtaaagctgccacctcccagagtgcagtggagttaggagagcctgggggctgggggctgggggctgcagggatggggtctgcatggaggtgcagaggtggagatggaagtgaaggtatagatgtgggagtttgttgtggctcgtgcctctcagataagaagaggtctctggattttgattgtcaagtctggggatgtggattgtatgagagaatttttcttttttcttttctttttaaaaatattttttatagagacaggtcttgctctgtcacccaggcagcagtgcaatggtgcgattgtagctcattgcagcctcaaatttctgggctcaagcaatcctcccacttcaccctcccaagtagctgggactacaggcatatgccaccatgcccagctaattttaaaactattttttgtagaaacaggatctctctatgttgcctggctggtctcaggttctggcctcaagctatcctcctgccttggcttctcaaagccctggaattacaggtatgagccactgcacccggctagatttttttttaattgcttataatcctgtgctttattcagtttattttaatcatctccactactttgatgaggtaagtgttctttgcctcagtttacagatgaggaaatcaagactcagggaggtttatcaattttctcaaaatttacacagctagtaagtagttaaactaggaattaaatctagatctgtctgtctccagagcccaagctgcttttctcgtcagttggaagctggttctaagtctggtgagaggaaacccgctgtgggaccctgtcttcccagcctgggtctgtgctcgtacatcctcagctgctgtattctcaaagctctatgctttgtcgtttttgtttttgttttctcttcctgaaattaattacccaatgctgagtggaacaatgggatacagaggcttcagagaaattggtttagttttcctcttgaatctgcttttggacaagtctcatttgagctcaggtggtccttttgggtcctgttgctggagggtggatctctcagtctctgagcccagccctggggtgtggtgctctgccccttgttctccgtcagccaagtctgggtgctctgggaaggtacttcccacccaccgtgcctttcagtgggcactccccctgcggggggatcttctctatccctctcctctctagatgcagctcacagggtggtttccgtggcctgcgagtgggatttgggctgaatttcctacagtgactgctttagggatatgccagtagggggttcaatttcagccccttccttgggtccacagtgctcctccacagtgggaacccctagcagctctgaacagcagatccagcctcgagcttattctggcagtgtaaccaggcccttcacacagcaaactgtagtgacatgtcagtagcacatgccctgcggttgctggtgccttcaaaagtgttcattttaggtggttctgccaccctcccaagccagacttcatgtgcacatcttccttattttttcttgaaaaactggaatctgacaagtctagcagagtgtgtttatgaagtgacttcttaagtagcagtatttgaaacctgtcatgaagatatgtgatgatattggtttggctcatgtgattaagtgatctgtttcgttcagagagagtgatggcagaaaagagagcccatggttttgaagaatacctctttttttttttttgggggggagatggagtcttgctcttggagtacaatggcgcgatctcagctcactgcaacttccgcctcctgggttcaagagattctcctgcctcagcctcccaagtagttgggattacaggtgcacaccactacgcctggctaatttttgtatttttagtagaaatggggtttccctatgttggccaggctggtgttgagctcctgacctcaggtgatctgcccgtctcggcctcccaattgaagaatacctcttaaaacatgtttaagttttaaaaagattgaaacaaagtctgtaacttttagcatgcaaccttcatggattctcatcattgggaaaaattttctactggaagcattggcatgtcttttgtagccatggaaactaacccttcaaagagagagaagctcttctatcctcaaacaaggagatacagtgaaaggaaggcatatttcatactcagatgcctgaaatactttatttctgtgtgagtgtgtgtgtgtgtatatatgtaatatatatattgcagatatatattacatatataatatatatattacatatataatatatatattacatatataatatatattacatataatatatatattatatctataatatatatattacatatataatatatattatatattatatctataatatatattacatatataatatataatatatattatatatattacatataatatatattatatatattacatatattatatataatatatattatatatattatatatatattttaaggcttatacaagactcctgcttgtttttgtttatcaatggcacgatgggtgtagttttaggtgattgaagttacatatgcactgtggccaaatacacccagtacaaagcccaaagttgcatgtctttgatcctcattagtgtaaagtccatgtttgtgaaagcaattatttaggtgatttttatcgagcaactactaatggccggggtttgtgataaggaaccagtatacaaagataagacagacacagcccctccttaacagagtttacagtctggtaagttaaagaaaatagtgaaaaaccaattgcaggactgtgaagtaaattctgcaaaagcggagttctaatctggaggactctaaggtagagaaaagtctttatgtcttgagccagccgagtgggatagtatctggaagagcaggaggggttatgcaggcaacagcatgcacagtggcctggtgttgaaagagctccatgccttggaggaactgagtgaactttaggatgtctagagtacacagttcaagggggaagaggtcagaaaggaggcaggagagatctgacatgaccagataggtggtgcattccttcactccatccctaccgcactctcctgctcagggtaagtgccacatgtaaacagttaggtttggtctgtgcagggtggcccagctgctaattcctgtgttctgttcatggtggataactcaacctagtcattaaaagctaggaaacaccgactctgaaaatgattcatcttcccaaaagatgaaaactgttttaaacatcatcaccgtcttttatgtcaatgaaagcatcaacaaccctggctgggcacagtggctcacgcctgttttcccagcactatgggaggctgaggcgggtggatcccttgaggccagaagtttgagactgccctggccagcatagagaaaccctgtctactaaaaatattaaaaaattagctggacatggtggcgcacacctgtaattccagctgcttgggaggctgaggcacaagaattgcttgaacccaggaggtggagggcatgccactgcactccagcctgggcagccgagcccagaccctgtctcaaaactaaaagtaaaaatagaaatgtgattgtcaaatgtttttcttcaacatattttactgtgtaaacaagggacccccattttctcgtcctttttgcccaccagcggttcccatgcatttcttggcagctgtgtttcatgactgctgctggagaatgctgtcccaggccagctgtcttccccccacagacattacctgcaaaggagcaggtcttatttatggggtgctgtattcctaatccctccccaccccactctgcctattggtctcatgcagagagaacatcctttggctatcaccagcttttcatggttgagggaaaaatggaacaaatacaatgcttttgatgaactatgagctgagccagtgccaatgattaaaaattttttaaattgtgaaacatcacacattgctgttattttttttttttttttttacaaaattcctagtttccttgaacagaaactgaacctttatgctttccaagaagttatatttaaacaaaaaagttctttgaatcaaactacatttgcattctgtttcatttccttcatgtctatgtagaggaaataatttaggtctaaagaaggctggactcccctgataaaaatcagtgggttacttcttcaacttcccccttctctttgcctttataagtgttgcctttgtttttttctgaatttctgagccttctgttttactaaaaatctgagtccctagtgattttcgtggcagttttcaatggaggttatgttgttttttgctttgtttcgagggttttttgttttgttttgttttttgcatgtgtatgtaaatatcaaagtgttttgtttgtttaaattttatgtgggtctaattaaaacagatagcattgcaacacaagaaaaaaaaatcctgtatctaaatcaagatgacttccagtggcccatttattttatgggacgtttaagaaataaaagttcccacagcaaactgcgtgtcctcttgcatctgcggcagtcccattccacctgcacctctgtttgtgtgtgatggctggctgcagcctgggcgtgctgtctccagtagtgttggctgagccaggggtccaggagatcaggatgtcagggcctgtaaatcctggggcatgtgagtgtctggtggcctctctgcagaacatgaggcgtgtgcccagcccgtgggggctccactggggctccttagatggaggctggctgggtctggggcaaggggttctctccctggagtggtgcttactgagtgggagtgagggacagcaggtggagagatgagcggaaagggggctgtcacctttctctgtcctgagttggggctcttggggaaaatcagagtgcagtagtgagcagagctgggctttatgccctgtcctccctccctggtcctgattcatgacctccccgtgagccacagccccacggaagggacgtaggatttggagcctggttagtaacgctgttgttctgttgactgggcatatgatgtgggccagcaacaatgcctcgttgagcctccgtgttggcctttgtgaaatggatgtgaaaatcctcctcctgcctcttccactgaggttgtgagcagcccagggggcagtgaatgtaaagacatttggaggactctaggaacaatctaaataaatgaggggcttttttctgttattgttagagaaggggacatggcagagactcaggctgttttgccaaaacccaggtcgctttccccagctgtgcaggctcgtattctgctgaagctgctgttggttattcctgggaccctgggcgatgcagtcacaggtgaaggaccctgggcgatgcagtcacagtggggtgggctcaggctgtgcttgtttcagagacgattttggcttgttctgctgtgtttgtctattccatctaaaggtcttttgggggctggatgagtatggggcgcataccattgttctgtcgtcagagcgccctgcagccatttctcgtgaactcactcagcacttatgcttcttgggtgtcaatgccaccaaactacttggctgccaggtccaagagcgtgccaggctgttgcccagggaaagaaatgggcaacaaaaaatggactaagtcacagcagtcaggtccccgtggaggaggtgctggggaggctggagtcgcagcagcagctgaaaggtctttagaacgtgctgtgatctggtgtcgctgccgagtcattagtccatctctactgaggatccctgtctggggaagttgctgcatcccagggcaactgtgctgaaatcagttgtcttatttcaaaacttgtgcctgtgccccgagaccctcagcaggcatccttcttccttcatatggcagcccttcagatactggggaccagcctctcttctccatccctcctcctgccccgcccagcccgtccttcttccctgaacaggtggacaagaaatgttcatgtggcagatggggtgtcacggggccctgacaaggaaggtccacatgaggggagatgattacactggtgtgctagacccaggggactggtgtggaaagggcagaggtgacagtgaccgtagcatggtggtggttgggggtcagtgacaggcgtcataggtgtttttccaaatagtcgtgtaagaaagttggggcttcatgagaagtgtgtttttgaccacattggtattgatgttaaatccaacccatcacccagtgcttactgaatgtctctggtcttcctcagcaccattttcttcttattttcattttctgttcacgcataacacctgtgaaagctgataggagtcctatcaaatttctgtctgttcctccttgcctacagagaagcaatccaggttccttagttttgtatttaagcccctttctggactgacaggaagcctgttttcgttagtttttttgtttgtttgattgtttttgagacaaggtctctgtctgtcacccaggctgcagtgcagtggtacagtcacagctcactgcaacctcaacctcccaggctcgggtgatcctcctgcctcagcctcctgagtagctgagaccacaggtgcatgccattgcacttggctaacttaaaaaaaattattttgtagagatggggtctcactctgttgcccatgctggtctcgaactcctggcctcaagcaatcctcccaccatcacctcccaaaatgttggtatttcaggcgtgagcctctgtgtctggccttgtagcctggttttgatcctcatcctcctggtgtctaccttctccttcctctgctcctgcttttccttccaggcatcgtgttgaggtgcttagggtagattcagcagctgcatggccttgtgtgcccacgtgctgtgagcctcagtgtctatacaagagggtgatagcagcccctgcctccccatagtcactcaccagcggggatggggtaaggtgttgctctgggctctggttaggttgcaaggctgagggggccacccagggtaggggacacatgtattcatgttttggtgctcaatgagtagagttttctggtgaattagaggcaggcagaatgcatttggatggggtaagccagagaatgtgtcaccaaaagcatgagacttgagcttggtcttgaaaggtgcactggattcaaagatgggagaaggctgcccaggtggatggaattctgtagacaaaagctcacagggttgcggaattgagaagagtgtggccagagtataaggtgtgcatttataggatgggtgaataaggctggaatagcacttgggagaaggctggaaggccttgagtggcaggcagaagcatctgaccttcatccttgagggaggcaacaaggagctgtgagacattctgagtaggatgccaccagggggaagtctgggtctgcagcgacctggagcagagagggaagcaagctctgatgaaatgctctggccgcagctcctgtggctgcccagggaatgggtgtgtgcagacaggcctgcataagacacttcacagctgtcctgttaggctgttagggagattccttactgagtaattgcttctcaaccaggagataaaagggaatatcttaatgacctagagacagaagatctaccacatgaggcctgaacacaataagggaaaatggcgagctggccgtggaggctgctccagatgatatgtctagttttgggcacactcatttcatgcttctgggcgatcccagcaattgtgggctttctgtcctatagggacattttctggcctcctgaaggagtaggagtagggcttgttttgttggatacaattttttgtacatagccttcctgcatgcctatatgaagtggcgccaaggggaaatagagacatgggaagaaatacatgagaaatggacagacaacattgtccgttcctgcctgcaaggagcttacagtctagctggtaagctgaaatgaatatgtaatagcatgaatttgaatttggttagtagtggagttatatcttctaagcattcaaatttttttctatttggaaataatttcaaatatatagaacaaccccaagaatagaaatagcacagtgaataatccatgtaccccttaccccagttcacctaatattaaattttacctcatttactttttcatttgttatctatccataagacatgtggactgatttttaaaaatattttataatttattactgtccttagttatttcagtgctcaaatttcctaagatttggctagtaggagctacttctctagctcctgtatccttatgacatatctccataatgtgttttggtttgtttttgttttttgagcacttccttattttcttcatcttgtacctaccctacccttgccctggaatcacccagttctccaaagtcccctggttccttttaatggggaatgttattagagaccaagatgtgggtaccaggtgtgcttgtacctgccagagcatctttgcttctaagtcctttcaacaggcagacctaggaaatatatgcatttccgtacacatattcatacacatacttacattgatacatacacatactcacatatcagcctcttttaaaaatcagacattggaaatcagactttaaaataaacatcttttagaaatcatcagttcacacctataccttcaattccagcctgtccccagagggttcttctctgttccgtgtttctgtgtccctccttccacagcgagaactctggctcccagcagcattagcacatgtactcactggctaaatcctgtaatatgtctaagatagtttcagaatggtctcatccacatcactgcaaaaaacaaagctactgaaaagagttcagcatttgtttgtagttcatccctcactccaatcctacccaagactgagagtatgtcgtcaaatattcatgagctatttgaattagttttgtctttctccttcagtctggttatggtattcatttgaattacagatttgtttgtttcaaatcactttcagtttaggggtattttcccttcatctcatccttactgacttaatttttaaaaatttaaggtgaagaacattaacatggttcccaaagtcaaaactatagaaaaaggtatacttaagagtgtcactccaaccttgattcctttggcctaattcattcccatcccttgttttctgctctttcttttagatacacctgagagaaatatgctccttttatttcccagtttttcgtgtgtaaagggtagcacactttattgctttttttttttttttcatccaggcacttcttatttatcttttgatcagacacaccataaccaaaattctggtttggaacaagaagactcctagcatataacagttgttggatttttagtcacttgcaaaagtctgttggtttctaccaatagctttattaaataagctttgtaaaacaatctcttagtaataggattcttagaatatgatgaattcttatgcaaagtggagtaacttttttcccatcattgcaaagtttgatagaaggtgcctcggacttgaggtgtgattttcaggatcagagggtcagttgtgatgggaatgggttattctcaactgagcagatagtgtacaggattggcagtgggtttgccagctcattgcgatcactctgagccttgggacccatgtgtccttctatgtgtctcccaatcctaacgggtttgtggcagcttagagcccattcacagctagtgctaatttttctccctttgataatttgagaaagctcttccatttgccttttgaatgtctctcttatgtctggattcaacaactattatacatttgaacttcacgttgataccactctttgtgttttcaaagccttactgaatgtcttgcttaattcctgtgaaacagcggaacaggtattgttgtgtctgtttggaagtgaggaaactgaagctcagaacacagcagtgacagagctaggactagaagccaggtcttcagacgaagagcccagagtggtgtaggagggccaaggatttatctgggtttatcacagggactctacctccctgcccccttcctccatcctgccctgtggccaacagatttctactgtataaacctcacctctgtccacatcaataaataataccttcctgctaaatattcagccattcagaactgtctaaaatcagttcagagggtctatatcagcagctttgttatatgagcttttgtgatagtgaccatcattgtgagtgggccataaaccaggacttggcagggttttttactcctaggaattttagtcagagtagagttttacttatgcctgcttacctgtgtcccagcagtggaaaatgtacaacagtgatgcagcttgttagaaatgggatttttatatttgtaatgttaaaaaggcataaaatattacaaaagaaaattaggaagatagtaaaagagttaccctgagaagcttaaggacgttcattttataatgtatgtaattatacattataaaatgtatataattatataatttaaaaataaaatataattatataattataatacattataaaatgtatataatgtatgtaattatgcattataaaatgaatgtccttaagcttctcagggtaactcttttactatcttcataatttttttcccaagaacccatatatgatatggacccaaagtaagaataccttgtttgtatgtaaccatctgaatttagtattctaagttcggaatcaaaacatgcaaacagatttgtactaggatacttttctggtgaataatagaactgaaggtccacttttctttgagatgtatttaagaaaacagattatataattcattttcctgcagatacatgacatgccaagccctcttactgttgctcagggatgtgattctggattgagttgtgattttttcagagttcagagaatcatttggtgaatttacctagagctgagttatgtatttcccatgtgtcaggaaaccccggaggcctagaaaccccaaaccattctcagggtgtggtacatgtgaatggcgagacactggagtccttacttctttgagacagcaggtgttctttgggctgggaggtcagagcacgtgtctgggctcagatcggctcctgctcactctctagatccacaaagcctggcctccttccttattcacagggggtggagtggagactgacagccctaacaggaccaaggataggttccagggagtctggaaagtggggtgatttagaagctatgagagggatcctttctttttcttttcttttttttttcctttctttctttcttttttatttttatttttattttttttgagatggagtcttgctccgttgcccaggctggagtgcaatggtgcaatctcagcccgccgcaacctctgtctgagtgggattctttctaattgtgggcagagggtggcacttggtgaggattccagtttcttatctgaagtattagtgtcactgggtgtgcaagcatctgttcagcccctcgacagcctagagttaagagacgggtgtgaatatggggttagttttgttgttgttgttattattattattattattttggagacagcgtcttgctctgttgcccaggctggaatgcagtggcatgaacttggctcactgcaacctctgcctcccaggttcaagcaattctcttgcctcagcctcctgagtaactgggactgcaccaccatgcccagctaattctttttattttagtagagatggggtttcaccatgttgaccaggctggtctcaaactcctgacctcatgatccacccaccttggcttcccaaagtgctgggattacaggcgtgagccaccgtgcctggctggggttagctttatgaaagcaggtcacttccccattcgtgggttgggttgggttgagttgggttgggttggcttatcgaggtaggaccctgaaagagacatgctggctttgactcggaacaaaggcaagaaggcagacagaagtaacctgtgtcagaatctcaaggtctgtgtgcagaaactgcattgctgtaacctcacctgcttccttggcagctttttactaagtctctaactcacatatcttggctcctataacaactcacggttggagatgcagatggttcctcatatataaaaattgggtaatcgtccacctgactctcaggcttgcctgagtatgtggggttttgtatatatgcatagtcagaggcttgcacacatggtggaaagtagcataaacaccccacaattgggaacatttacctgtctgccagatcttttccagggcaggtgttcctataaatgggcagaaaatcatatgcctcttcccctcctgcagggaagacttttggggaagaccatgacaagtagcaggggttaagaaaaacagtaatgcttcatcagtgctcgagttcccatctgggaagggagaactgggttgtggagggggtggggactgccctgactccatgcactgctctggcccgaacctgcaggtgatgggtagaggagcctagtgtgggcaccagcaaggactgctgcctgctcagagctcttggtttggacaaaaggggtagcacacaatattaatgcaaagtttgtccaaaagcattgaagaagttctaaacttggtactctttgaccacagcttggcccatttgggtccctcctctttgaggaggctctggggaaagtggggcgtctctgagttcaggccccttgttggggggtgtcagaggcctgccatgacagcacatggtgttttgggcctaggccccttgagatcgctgtcatcgaggggagttcattttctaagaaatgatgcatgtgtgttggtgtgggctctgcgactctgacccccatagtcttgctttggaagacactgtcttctgtcctgtccaagtgtgtggctccattgctgtgctcatgtgactatactcagtgctgtgtgtcctgcccacaagactgttgtgcagtagggcagtggctcaggatgcaggtccccaaggatgtcctgatatgtgcttgtcctctttgcctccttcagagaattctcaaaggaaagagagaaggcaaaagcacggggagatttccagaagctccgggagaagcagcagctggaggaggatctaaagggctacttggattggatcacccaagctgaggacatcgatccggagaatgaggaagaaggaggagaggaaggcaaacgaaatagtatgtagcgcctttcctgcccctggctagacagacccagtgtgcggttcagacgcctagcagtaggccttcctcgactctgacccaggctgtgagtgggacagcctcctcccagccatctggtcccttctgcctgcacacatcacggagagaacaggtgcattggtgctgactctggatttctgcctgaggtttggggtttagagttgtatttggtaaggtggctttatagccaaggaaggtcaaacggacccactgttggcctgggaaattcagtaagcgcatttctgtgcgggcacaggggtgatgagacacatattcttgtaccacaggagaagaagctgtggtttccctcacctcagagtgaacagtgttattggacaagaatttgaagtgcagggttcctcttgactcttactcttaggccacctgacatggctcctacatgtgctattcatatgaagccatatgcttagcccatcaggggctgggaggaaaccggctcaccattctaggcaggtgttaaggggcacgtgagtcagtgacagctgctttgctgtcacccatcgacaccccacactgtgacactaagcaccctagagcaccttctgcaggaggcaaggcctgagaactcagtccatcactgacattaattgccattgtcaaccacggtgtctctttcactgcatacttttcccacagatgcgctcttattctctctggggccctttgtgcctcgggtcagagtggaaactggaatccagcaatgcatttgactgagatgtctgtgacttgcttcaaatctagaagagttggataggaaggaccaagaacgtacttcaagtgcacatgtccattgagaggcctggggacccgaggccggccctacgttgtagaagatggccgagcaagtccctgcttgagcagagcgccttggatgttttgctctcagcaaggcctgttgctgggtacaggggaaacccagagctggagaggatgtggagtgctgcctcctagggagagacaggcctgtcacactaaatgcagccctggggagcagagctgcagggcacacatagagggcaggcaccgccgacgagggatcgaggacagggctggagggagcatttggcctgggccctgaaggatggatggattgcaggtgtgaccattcagtgtcagaagaagcaccctgacccaggggactagcgtgagggaggcgtggaggtggacaaaggccaggtttcagggaggaagcagtgggcccttcagctggagcacagagggtatgaaggtcggggtgagctgccataggaagggtgggtgaggtgcaattgtgcctcttctggaggttgtggagtgtgtaagtgggggctgagagacccctggtggagaggcttcttgactgagagggcccttacctttcttcaagcctgggctctgtgcctccatggggagggagtgtgttccgtgatctcagatgccctggctggtgcaaaccagtgtgctgactgggagtgggcagggtcaggcctctcttctctccctccctgcttcttgccaggctcaggaaggggccaggactttagcacctgaggatcagaagactgagggagggtttctagagctaactgtttgctgaatgcaagttcagagtttataaatagacattcatgtgagtctcagactcagcgatgtgcctatgaagtgatcagatgtaagagtgtctgcctgtcctctgcacagctctccccttggcagttgagccaacgtgaaccccatggctttcgtggagcttctgcacctgcagtatggcaacaggccatgtaggtgcagcttggagatgcctgcaccgctcttttccccttcacttgcaaactgtaactcagatgctgacctgccccatctcccctaaacccaacatgttatttgtaaacgagaggaggtatggcccctttttctcagcagagtgtctttctttgctagtttagctgtgtcccccagggagctgagtgaggccttcttacaggccagtggcctttcctctgtttatttctcctcctctagaagtagacaaggtttcgtgttctagtgttgctaacattagtcgtggtagagttgtttatagggcctatgatttgaggattaagggttttcattggatttaaggtgatatcttgagggttaaccattttatctcagcccagcatttcctatgacctatcactgtaaaaacctgatgatgacagaaatcaatgactctgcctttcagagaacttgccatgaggggaagatggagaaggagtggcttagtgtgagaagctgatcccattgttaaggcccagcactctgctgtgtgagcccaggagggcgcgatgattctggctggtgggagtgggcaggctggggcgatgtgaggaaggctccgtgggaggagcagccctgggcggcagaggttgggggtgggggctttttcaagctggggaaatggcacaaacaaggtgtgcgaagtgacaaatattcagggcccttaagtgcattgctcagtaatataatctaggaaagaaacaaaacctgtttaaaagccttgtagatcttcagaattcactctcactggggctcccaagcccataaagctgcaatgtgtcttgggaacatcagcagtattgtttctgctatgcaccgtgatgtgtgactcaaaatgattaactagcttaacgtttgatccagaatagcaaatatttctgtggtgcgcccttgttctttatggagctcgttttgccaggtgctggggtttcctgtggagtgaggctcacagtgcttcccgagtcatcagatttccagagccttgctgatgagggttttaaataaagacagaaatcttggctgtggaggccatgatgggatttagctgacttgagagcaccaagtctcctcctcctctgaggagagaacctctctgatcacagacctcagcagcccagaccctctggaggagacagcactgttgaggtttccctggggcctcctgtggctgccagccattttcttcctgtcacagccagaaaaccacacaaggagagggtttcagtgaggcccacatggtcctcctcaccaaataaacagtcctggattcaccacatgcacatgccaggtctggggctgtctctgtgcatctgattagcaggcagtagaaatgtgggtgttgccagtgttacggtgtctgcatcctccctgggggtgtgagatcaccccacgtgccttccactccaaccctgctcctctgttacctcttgagaggaggatggcgcagggcccgggctcctgactttgtccataatggctaaggatgctaattcaactgagagcccttttcagctgggtcctggatgtgagttgagcagtttcctcccagaccttgaggattgaagtgacagtgtgagaagaaatgcttcctgatagccgagcctcagcctagatgagcagaagtgggtgtaggaagtcattaataacagcagatgtctgtgagctcacaggaggcaaaggcttgggctggagggcatcttgatgccccttctccggatgtggctgcaatggagttttgtgacttggaatttggactttagtattaggcaaattactcaacctctctggaccccactttccttgtctgcaagaaggggataaagatatatctccccatggggctgttgtgacaattgaacgttctgtgactgctaggagtagtcatagttgtagtatgtgctgctgctgttttcatcagacaccagtaaaagttgacctcaacagaattttaggggtataaatttagggggtacaaataccgttctgtgacatggacatattacatagcggtgaagtctgggcttttagtgtaaccatcacccgaaaagtgtacattatacccagtaagtaatttctcatccctcatgcctcttccaccctcccacccttctgtgtctccaatgcctattattccatccacaccctatgtccatgtgtacacattatttagcttctgcttatcagtgagaatatgcagtatttgactttcctaaacataatatttttgaaggttctcctagaccgctaaccagcctcagggtggggcctccctcttaggaccattgccctgtgcttttctgttcagaaactataaagttctgaagtattgatggaaaacaaatctgttaactaggtcactttcgagatagggcagcacagctttcaggctcttgaagtccatttctagtttggcggtgcttgctgtcagggaacagatgtcaaatcaagtacttggagatgcgctcacattatcttttctctctgatctgctaaatgtcactgcatgcgtctgcgatgcccaacactggctgtacgttataatcacctggggagcttggatgcttcttgatgccatactccaccctctaagactcttgattaatcttggggtgggagccaggggtggctctttttcattaaggttccctggggattctaatgtgaagctagggttcagaactcctgagtccaggatgctatcagtggctgaatatcacactgttccaggcattcacttgaaagaagaggagaggcaatcaggcctctaactgagctgtctggtgactggtgacaggtagctccagctttgtgcattcatagaatatttaaaatgtcaatttcataaatttgctattagaaagctggtgttacacaattaactgaatggacaaaattccctttgaagtgagttcctgagcatttggtaaattttcaaggataatttatttaactttttgctgagcttcaagtttcttaagaaaccctgccaaatctcaaagtgatttttttagacatatgcagctgcttctgagttaacaatggagttttgctaggaccattaaaatctggaagcctaaaattctattttaaactcttctcattgtcagtgattagtcttaaaaaaaaaaagcattaaaaatgaaatcattttaaagggagctcattctaaaattctggccagaaaagcagggcaattttattgtaggaactattaatgattaataattcctctaagtaaagatatttgatgcccaaagaaagggaggggcatacctgaaacttcatctctgaccacaagggcagcctctctgtcttctgcttcttcagtggtcctggaggctatgggcactgcccctgcctgcccggggactctgccaccctggggcttggtggagcaggttgccctagctgcctctcttttgcatgtgctacctagttgcctcttactgcaatgtttgctttgggggtggacagaaaaccaggacgttatagctggttgcaagcataaggcatagcaatttgctggtcctgttttgaaagactgtgttttgaaattttgatttacaaaactgctttcatcaccattgaactacctcaaggcacaagttcaaaatggaagatactcaagtaaaagctgtaaagcaaacagcagcagttagagtggcatacggtaaatatgcgtccaggtcaagagccctcactggagaggcagctggaagtgctttcactgggaagtgggagggctgactcaggggctggccctagggtcagtggctggacactgtctccattggggtggcactgggagtagttgtctggacaggcagactctctccacaggggtgatagaaagcagtggtaatttctaaaagtgcctgcatgtctgccatcaccttcagcctcctaagagctgatgggagctggactcagggactgttgccccactgtggagacaaggagtgggtactccagccaagtttgcagtctcaaatcagggttgttttatttgtttttaatacattttaattatggaagtaatatttgcctacataaaaaattcatgtaatttcaaagtatataaagtaagaaaaaaattctctcttccttctccttaaagagaggcagacttagaagtttggggcctctacttccccacctcactgcacataatacatgacacagaccgcatgcatatagcttccaccctaagatgcccaacacaggtatttttcactgaaccatgtaccacagatatttcccatgtttttaaagcaaaatgttggctcttttcaataaattgccattataaaaactgctacaatggactatgcactctacagcacgtggacctctactttatagaggtctctccaccatgagaccatcagctccatgggtgcagcaggaatagggtctgtttctgccctctgttgtgtggctgcacccagcacagtgcttgtcccatacatgagcatgccattacttccttcttgaatgaaagaacatagagtaataataactagcatttgtcaggtgctttctgtgtgtgagacactgttccaaaggctgtgggtgaatacattcattcttcttcacacaactctgtgagacaggaacttgacagatggggaaactaaagcacaaagcagttcagtagcttcccaaggccatgtgacttacgtggcaaagctgggatttgaacccaagctctgccacagtctgcaggctaactatcattaacccctgcaaacacatgcccctgtgtctgcgtgctcgtgttcatggttttgtgggagaggatacaagaaaagggtctgctgtgtcagaaaggatgcacattttaggaacgtgagtattctgcctacccatagtgtgcaggtgtctgtgctgcccatgcccttgcttactccagcattcctgctgctgtctcacactgcttcgcacaaccctcccctagagcacagggtccgtactctaaagactagctggcttagagtgatcatggaatcatggggctgcaaggggttaaagatcctagagtcatttctctcgtgacctggtggtcatgggagagtcgtagtgatgacagtagtggtggttgattgtgccttgccaaagctgggcacattgcttttattactgtctccactgttcacctcttacaacaaccttacgcagtacaggtccaattattattgacatcttacaggtgtggaggaaactaaggcttcacagtatcaggtaacctgtccacagtcttctgacatggaagtgacagggctggggttagacctggcctgtcagagtccagagcccaccttttgaactcccacctgtcctgtcccatatggtagtgctgtttggaatcacatatccagtctgtacagggctcctgactccccctaaagtgccttttccttaataccctacttagatgggaagccaaaccctggaaacctttatctagcatgggttagctggttgttgatttagaacaggttcttaaagacaggtgtttgtgtaatagctgtggaaagggcacttcctctccgctgttctgatgctgagctggattcctagcaggaggggtctggggcaggcgggcgtccattgcgtgaggcaacctggctggcagggctggccgcgtggggccctggtttggctgctgttgctgccctctgctgcttcataatgaaattgcctgtgttcaacctgaaggggtcacagtggccgacttgcttaaagaggataagaagaaaaagaagttttgctgctttcggcaacgcagggctaaagatcatggtaaattgctgagactgagctttctttttccgcaacatctctgataccttttccttgcacataggcattgtgtgaagtgcatgtgccgtgtggtgtgttcagaagatgcctatattttaattgcttgatttctttcttcttgtctttttccaaaataatgtgcccttaccaagatagcattgcagttttctttttgtttgaactgtaccttataaagaagcagctgaaccaactcaaaaaatgtacttgattcggcatgaatattcttagactggaaggcagacttttaaaatacttttccccaaatgatttttttaaatttaaaccgtttagaaattccaataatgttatttgattgatttttttttctccaggctacatgtttcaaattgcttctctgtcttttagtctctggctactttgcccaggactatgccaaagctagtagtggcagctttaagaatgaaattagctggatgcagtggctcacacctgtaattccagcactttaggaagccgaggcaggaggatcacttgaagccaggagtttgagactagcctgggcaacaaagtgagaccctgtgtctaccaaaaattgtaaacaaagaagcaaacaaaaaaatcaggtgtggtggtgcatgcctatagtccccagctacttgggaggctgaggcaagaggattgcataagcccaggagttcgaggctgcagtcagcgatattgcgccattacactccagcctgggtaacagagtgcgatctctgtctcttaaaaaatcaaaataaataaaaatagacttcagggatgcaaagatttgggggcacttgcctttgaaagtgagaatgggctcgtgtgggaaagttatatttccagatatgtcctaaaatgatgctaaacatacccttcctcagaatccctggagtagctgtcaggcccatccccaggcagacagttaggtgagcagctggctccctgccttgctctgcccaagtcatggcagtggttcgacagcagcacaaagctttgcctatgcacaccagcacagtcgacccagttctgccaccaggatcggccctggtcacctgactctggggaaagtctgtttaaggagattcagacagcagggacgtgaagccaacaactaagggaacagaggggacacactgtactcttttctttgaagtggcctctggccccatgggaatgctgagctgagaggttatgggacgcagatgggaacaacccgtggatatctgaagagggttatattagagtctaggtctcatcagaaggcctaaaagtgaaaaggaattaagagattatcagatataagcccttgtcattcagcacgttgtggaccccaaaggagggagaagaggaggtggaacttgcctgaggtgggacagtgagttaggggcagagttggggctgccttttttatctgtagcattcacggaaggtttatgaacaggaggctgggcttgatgcagcacctgaaggtgtctgcaagaagaatggccttcagctaagcaggaaatagtgtcatggacataagaaaaaacatctttaaagactgacataggaatatagctctggagaggttaccaaaaggagataaatgatttctgtccccagaaaagaaaacacccctccttggttctgccttgctgaatgcaggcttgggccttgtgattctttaaggattcttgtgccttctccattgtctttctgagatctgcagggagaggaagcaggctgacacatttaaggaactttattttgagtgggaatggctttttattgactgaaatacctggggactcaggaaggactccgaccctgctggcaccaggtggggcacgagccctcatatggatgctgggctgcccctgtccctgaacacgcggagatagttattgtctgggcataattcttgcttgagacatggaaaccttggtctggccttgacctccattctccaagaagagcctggcttctttacagcagcaagaggctgttactctgtggtggcctaatgtgtctctactagcatgtgcatgtgcctttagggggtgtgtgggcttcttctggatttggcaggcctgtacgtcatggtactgctcatgtttgtcatgaaaataagatgaaaacatgaggtctaggtgtcaggtaccctgtcccctaggaaggcagccacaactcagccactgctcagttgtccagcctcaccccctacccttacctttgaaaagaatgagaagctttaggctgcttggaggtggaaggaaatgctaaaataaattcctgagtgtgcaaaaaagtctgtcctgtggagaacagaggagtgaggctctgaggccaaagacatctgtgaatgaggctactaatgggacaggttctagacgaggctggagggctctgggctcagtttgatgtgtggcaagccttcccttcggggtgccttgactggaggactgaggctctcctgtgacgccctgaggcctctggggagctactgcttcctgtgctgcaccccattctctgggacattctacatgcagagcacttggactcagttctccagtgcaggctgctggctggacccctggcttccctcctgagggtggtgggcaggggctcacttcttgtgccctcccctccttgcagagctgggggaatgcaagggaaaccccctggttgttggtagtaaaaccagccagcatgtgggcgtttctgccttcctgcagttatagcaggtcagaggtaaatggatcttagagatgatactgtcctacaactcatcttacagatctggtagccaagcataggggaaaagaggcacttgtcccattgtcacctgatgataagcaccaggctttcctgacatttcttccatcatttttgacctcatcagcctccatcactgaaggttgatctgagattttgctatacctgttaatggtgaacataattttgaggctgcctgcttaggacccacacatagactcatttgctctgtgtgtatgtgtgtgtgtgtgtgtgtgtgtgtgtgtgtgtgtgtgtgtgagagatttgcctccaaattcacaagcctgacacatttggctgagacgaatgtcgtccttcagcatgagagtagatggataaatgtctacaccttggtgaaaatgctagttgtgcttacctgagaagcagcagatttccctggtttactgtgtgtggcattgcccatgataacatctggcccagtgcaagatcttaaagagaagcaccatgacccacatccacagagtgctccaagtaggggcctggcccggctgcccatgctgcaaaggccttggaaactctaattacagtctgggacatgcagggctgctgtctgccaccatcctctcacccccagtggcacccaggccccccgccaccaatctcagtgcaccacactgtaagcctaagggtctgccctggagctcttcccagagatcccaatgcctggaatagattgcaaaatataggccttgagcttctccagattttcagcaggcaaattgcagtgccagcatcctctcacaggtcacaggctttcctaatgcttggtttttcccagactcactgaaagtagtttttaaatttatataaaaaataaacttctctaacaaagctctaacattccagtttcctgaaatgtgtcagggaagaggcttcacagcttgttcatgtgcagatggcccctggtgcttatttctacagtaggggactggcacttgtcggcaatgtggggaggtctgaggggtctgcctgcacctctaataaggcctagccacttgtcagcaattaacactgaatccctgctgaaggggacaaggccatcacctaaatggggcagtcacaatgctatggaagccagttaggagaagcccatgtattcgggtaatttgcccatggctttaccttcatgagtttgtatgactctttctgtctggatttttataaaagcccagtcgtcaccattgcagcctgatttttgtgctgtcgtcggtcactgagctgatatcctgtaagtgatctggttatatgccagattttgagtggttaataaaggtcatcagaatagtaaaccagcactggtagataatagactcgtttggctttttggaacttgttgatttgtggaattttaagtacataacaccaaaatgtataccagtgaaaccacagtacatacttgaaaagaatggtgagtggaagttaggagagatttctcagtgtcagctgtgtgtcccaaggcattttggcgagttctgtcctctgagaaatcaagagtttgctcacgtattctcagaagccccttctggttctaacagtctatgattcttttctttattttttaaaaacatagatgagatcctattggggctaaaggaagggaaagtcatattaattttttaacattaaaaaaatgaatgcctaatgcaagtgaagggtaaaatgctttatttttaataaatgaggtctttgttatacccactgagcctgatcttttcaaatatttttggaaaaggataagtgtgatatttcttctggaaatattttggaaaaggatcctgtgatagggagtaagtggctggagaaggtaggctgccagggccctggtcagagtgcgtttcctctgcccagatttaggggctggatcaagggctgtttccaggaccaaatgaggtctccaatttctagcgtaggcactgtcctctttctttccgtctgcctctgctcatcctcagccctggcaacatctttttgggatatatttatttattatgtgcctgtggctctttaggtgtcaaacaactatgacaggagaagttgctatgcctacagtaggcaaagttagacaataactcagctaaagacagagaaaatacaaaccaagaatgatggccaaagctgattcagaggtatggaagatggctcacactagatgcgtctgtgcaatgatgaaagtggccagggcaaaatgacactggattggtcgctttgcttccagggagctccaggagagcttttctgagatgatggagttaacatgtgtgggcctcactgatcatccagccctggggacccagcactccgcatgcctcatctcattcttacccttttacaggtgaggcaatggagatgtacagaagtcaggtcacaaacgcggggttaaacttagatctggccaacctgtgcacctgctctcagccactatcccaacccagctgaaggacagaatcagctcagagagcaggaggaccctgcctcaccctcagtggagccctggcacagtgctgtgagactatcttcccctctttgttgctgtttggggagttcgattttacttcttgtctttccccacagttagtctagggagcaactagaacatttcatacactaatagttggcagggggccagaaatgctaactgatgaccccattcccatagaaaatatgtaatttatctgtttcaatcagattgtttttaaaatgaagctttagaattgaaatgctgcaactgtaccgatatcagcatgagacatgactccagagattaaaaagccacaaagacttagtcttttcagaagtttgctcttttgaaaataatgactaatgttcctacatgatcaatattagaactatgagatagcaaactgttaaagatggaaatgaccctcaagattgtggagttcacaccaccattttagagacaggaaagtgaagcctggagagaggtgatccattgcccaggagactcagaaaacaggaccaggcctgtgggttccccacatcatactgccctcaactcctggtcccctcagtcactgcagtaaccaccacggaaaatgccgcacagagttaactcatgatcagatgtgaaaagggtctcccactgtgattttctttgttggatttaacaacctcctcacctttctgctgaatcagagtgaggaacagtcgaggagaattgcatgagtagcttcttgtgtgtctgtgtgtgttaatggagtttttttttttaaggtttttccatgattagagtcgtattttttgtttgtttttgtccagttttttttgtttgtttgtttctgcatgaaataatgaaaaagtaaatcaaggtttgtaattggtttcttctcacttaggaaagaagaaaattattctatgagagtaccagcaatgtaacatgagtctataattttactcacttggtcttaacttttgacacccttgcctcagtgttcctgggcatggcgtggaggctcccatgcaggcaggctcagtttctcgggcactcacaagcggaacggatcagggatcttctttggtatcctcaagaaacttctcagaccactgggttccttgagccaggttccacctctatccctgctgttacctttatgaagtctgctatgagcaaggcgggccgaacacagccccctacgcgagctgcctgatccagctcctttccccctgagcctgggctgggcctcagaatcttcgccatagcgcttccagcccactaccagtatttgcagatgaaacttgaggcatccttgctaaggggagccacacgggcagagcccatgggccaagctttcctgaagacatcgtaaggtctgtaaaaacagtcactacagttcaaagccatgcctcaggaaaaaggaagtacacgtggattctcttccgtgacttcctcttttacctctgcaccccggcagaattaatccttctttactctggaacctcctgcacagacccctgaggtagctctcttcacagctgatggaagtgagctgggggctgcctgtccctcacccctattccaggtgggtgcagtgctgtgtgccctctttttgcccctgccctcctccactgcctgggctccagcacgtgttcgtgatgtttatggggttgaatcaagtggatgagaaaagacgctcgtgcaccagatggtggccctgggtggaccctggacctccacacactagtgggcgtgtttccacatttcctctacttccgctcaggatcctaccatggagaagtgggatgggcccagagaccctagtcatactgagaccagagtcaaccttgccctctgctcactggttgataatgatcttcttcttccactcgtaacactataattccttggtgctctagttgttcttacccagcttactgggtaagaactttctgtgtattggcttcacaagctcagcagaacttcagcatcaggtaaaatagcaaaaaaatagagttcttaactctaaaaaatgttgtgcatggtaccttcatgcactgccttccccattcacaatagctcttctccctcagtatatttaagatgattgactcatgaaatgttagggttattcacagatgttctatatgcaccttttggggcaagcaaagatgtacctgtaaagtacattttggtggcttctcagtgtgatcccagagatgaggaggataaagtggtgctatacccagccacaggattcactttgatcccttagcttcctttcttggaaatgtctagggggatagaatgtcctcctcgagggggactgtgtttcctacaggccatgggtgcagagactcgcctgcagtggagatgcctggctccttggcactcccttagcccagctgaggccctgagggcccttttcaccctcctcctgggttccggaggtctgcctggtggcagaggctcccacctggcctgcctcccaggcgtgcagtgtgccccgcatgctctctgaagcccgtcttctccccacagctagcatgcccaccagcgagactgagtctgtgaacacagagaacgtcagcggtgaaggcgagaaccgaggctgctgtggaagtctctggtgagtgtggggagcacttgccctctttcccctcctgttgtctcagagaagcaggtggtgaggaagaccgcccaggctgcagcagagccccgggccatcgccttgggtgtggcgggtgggaaggctcctcgtaccccacgccacgcttcctcctgtgccagggctatccctcctgcacacctccccaccccccgcccccccgccccccggcccagcatttcacatgcctcttcctgtaagtagagcccgtgaagaatgtggtggttaacctggccacctgctgtgtccattaggtgctggtggagacggagaggcgcggccaaggcggggccctctgggtgtcggcggtgggggtaaaggcctgattctccttccagcctgggtttggcatttgtgcttttgaagaagagcttctgtggcagagttgctgactagaatgtgctacgtatttaagttttcctttgctcatgggaccttcctaacctcaggcctggcggttggatgacgaggccctgccttcttggtgcctggcactttttccctggagccctgcaccagcctctcctcatgatggaaggcaccattgcattaacactcactggcttttttctagatgatttgggctgtggcagctggcgggggggctgggggggaccagcagtgcagaatgtgctgggcactgtctgccgtgggggagccctgtgcggtttggttttgtttgcttcttgctggtatccttcaggtcttatctctgtaaagtgcaggtgtcatttttaagagaactcaatcttactcttggcagagtttcataaaaatgatgtgttatgggcagaatatgcaaccatttgtgaagtgattttgcctccattctcttgctctgccctctctgagacatcatgaagcagacagagaatgggtttgtcatccccactttacagatgagaatgctgaggcccaagacctgctgctttcccatactcacccagtgggagaatggcagtgctgggactcctagtgcagtgctccctctgcggtagtagcagcaaatgctgctgtcgagatgagtggcaggagagactctgctgccttcattttggcccctgcatcactgcctgctgccagggcctgcagggaatctggccgagtcttccctgacctgggcctcgagggtgctcagtctgctcctctggccctggcagcatcctaatttctgctctggccttgcccctgctggcctgctgtggtaaccaggggtgctaagtccaggctgtatgcatggcttttatgatatctcagctgaaatgatggggagtgtgtgctcaagccctcggaaccagaatcttaacactttttgtctttctttcagtcaagccatctcaaaatccaaactcaggtcagtatcttctttctgtttcttcgtcagcctgtgtgttgcctttgtatgttctcacttctgaattttacgtagtattgctctggacttgagttttcctctgtggattataacattgatactgaattgcagtcagtcaattgaatcctatgagcctggcttagggggagatcttaggtgccaaagatctccctcaaagtaaaccaataagactcagtaacgagttttgcctccccattaatcctccttatcctctgagtcattttcctaagagagctgctgcttgtcacttttctgctcgaaagctttccatagaaagggagttcaagaagtcttccaaggtactagcatttcttgatgtgcatgcgggttacgtgttcagttggtaaaactcattgaaccatatacctatgattagtgtactttttcatctgagtgtcatttttcaacaaaaacattttcctactatatataaacactaacttaaaataggcaaagacctaaatataaaatataaaatcatgaacattccagaaagaaaacaggagaaagtctttgtgatcttgagttatgcaaaggtttcttaagatacaacacccagtatactttctgtaacagaaaacaaacagataaattggtctttgtcaaaattaaacttctgttcttcaaaagaaaagaaaaaggttagcttcagacttggagaaaaatatttgcaaagcatatttgataaaggactggtatcccatatatataaagattaatgcataaaggagagtgtcaataatagaaaaacccaataaaaaatgggcaaaatttttaataggcatttcaccagagaagagatgtggatggcagataagcacatgaaatgaccatcagttgttacaaaaatgcacattaaaatcacagttagataccactacacatctattagagtgaatcagatttaaatatctgacaatgacaagttctgacaaggatgctgattggtgggaactttcatacagtgttgatggacatgtcaaatgacacagccgttaaaaaaatagtttggtagttcctcataaagtttaaacatatatttaccacgtttatatttggcccagccatcccacttctaaggtgtttgtataagagaaatgaagatatatgcctacatacaaagttgtaacatgaatgtttgtaccagttttattcatgcttaccccaagctggaagtaacccaaaggtccatcaaatgtgaatgggtagacacactgtggttcaccagtatgatggagtactagttcatgtctgctgagttatgcatcctaggagaaacccagctgtgagcgggacagtctttagtgtccttagtagagtttttccacgctggccaacatgttagaagctgctctttccattggaacctgcacagcaagagtaataataaaatacaccttacttgatccaggttttggtaaagagttggcacaactctttctctgctcacttcctgggttacagattttctttttgcctagcaacacagctgagtcagccagggctgcagcttgggtagcctggagattcctcttgactcaggcccccagaggaagtaccccattgtcgttagtgaggcagcacagcctggagaggactgactttaccaattggctgacctttccacgggatctgggtcactgagctgcagctcatggcacactttaccaaagcatccccttgtggcagggaaggttttctagaaggagacaggctaagggagagaatattttctctaatcacaatcaggaactgaaggtaggtggaggacatgctacttgtctgtttggctgagctcattttatttttatgaaaacacgattcaatattggctcttctcctaaaggtatattttgagcatcactagttagaaagggcacctgatgactcagtatgaagattcatgtcctactcagctttgacaactctgccaggctctggaggaacctcagagatttaagaaaggattgaaaaggttccctttaaaaaaaaaaaaactagctttgtagcactttgctgcctggtaaattctgtatggtgattgagatgctgcaagagatgtgtataataagcgaagtggctctctgcactgattgcatgagcagatccacgtcccatatggtggatataggaactgcatatgtgtgcaagtgtagttttgcatctgcacgtgaatctatgaatatctagattttctaacccacttaagggctgcatatgacagattctggagttatctataagccataaggaaggactgatagcatgatcaagtcaagattatacttttaaaagtcgcattttaagaccaacataatttttatgatgaagtctgttaatttctgtgccatttgtgctcatctttctttcctgcactcccaccccaatctagacctccagagtgaaagccaaattatctctcaatcatatttattggatactcagatgctgtatctgtcatctacgtagtaatgtttgcttgtcttttagccgacgctggcgtcgctggaaccgattcaatcgcagaagatgtagggccgccgtgaagtctgtcacgttttactggctggttatcgtcctggtgtttctgaacaccttaaccatttcctctgagcactacaatcagccagattggttgacacagattcaaggtacaagcagaggccattccttttttgttctgaactagagatttctgtggctgtccaactgccatttggtcttatctgatcgctgcatgatgaagtatcgcaacatttctagtgaggacaaacttggtagaaccatccagacacagcaactaccagagcgagggtgccatctgtgccgcgtggtgaagcaccttggagccacttaatgccaagcatctaattgtcctaaccctgagccaacctaggaccaagaattcttgaagctggaagggacctcgtaatccctgctccctgccctcatcggggaagcttcattttcccctatagtacttctggcaaatggttttggttcccctgctttgaatgctccagcactggggtgtgggacactcatccctagagacagcccattctgggtttgacagttttgagcctttgaaaagtccttcctttcatccagtcaaacccgtttccctctacctctccagcctgcttggtgatattttcagctgttagaaatgacattgataggtgactgcttctgatatcgtcatgccataaatgaattcagacagatcttttctgtgtgattgaatgaaaaaatatgtataacctgatggtgtcaacgcagaatcgtaggcttttagggctggaaggagtcagagattatgtgatgagctgccccttcccattttgtcatcagtgacactgagacctggagaaatcaagtaacttctccagagtcacacacatagctagtagcagaagcaggaccagaacctggtggacagactgtccacgcgaaggccacgtttctgtcctgagtgaggtagtgaagagagagacaaggtattggcgtatttcctgtggggcctgatagggagggaggtgtgaggggcacgagcagtctgagtgtcttgcaggagaccctgaggatgggtgcccctttgtctttccagatattgccaacaaagtcctcttggctctgttcacctgcgagatgctggtaaaaatgtacagcttgggcctccaagcatatttcgtctctcttttcaaccggtttgattgcttcgtggtgtgtggtggaatcactgagacgatcttggtggaactggaaatcatgtctcccctggggatctctgtgtttcggtgtgtgcgcctcttaagaatcttcaaagtgaccaggtaaggaaatgtgggtcccactgcaaatgttttatgaacatgaggcggcaaccagtcacatccccgggcaggtgatgttctgctctgtcctgcatgggtgttctgagctgacaccctcatcttgacttataggcactggacttccctgagcaacttagtggcatccttattaaactccatgaagtccatcgcttcgctgttgcttctgctttttctcttcattatcatcttttccttgcttgggatgcagctgtttggcggcaagtttaattttgatgaaacgcaaaccaagcggagcacctttgacaatttccctcaagcacttctcacagtgttccaggtgagtcctccctccattccccgaaaagcacttcgtgagcagcagctaaaactcctctgccttcttgtctgctcacactcaggaagacaaaaggactccatttttgttcatctctgccctaatcatagcctggtaaattttgtgccatttaagttattcgttctgcatcatcctccagctgtctatcttaagtgatgtaatttttttaaagacttctagctacattacaaaataataaaccaaaaaaaccgtttttcacactcaagctcttccaagaaaactttttgattgattttatgaggtttctttgaaatagactctaaaattcttttctctttggtactttttgatggcaggccagttcataatcctagttataatagatttacacaagaagtgaattctcatgcctccatgctttggtgtgtagttggaggaatcagagtggtaggaactgtggcagccattggtcccttctgtcctcctcctgggatgcagtgaggacacaaagattctgagggtgcctgtcctgtggggcctctgcaggcagtagctgagaagggagcggtggttgcagagaggcaccgatggctctgctgctcagagcagcagcacatgctcccctgactctacgctgaggtgctcaaaaccctcctccttggacagggtctgatggggaagtttaaaagacccacctgtcctcattgcttttcctgtgtgatgtgagctgcagagccctgccagagaggaaaggcagcagacagctgggtcctgtggtggccctttccatgcccagctctctgctgtggatgagtcacttacccatttctgaagaaatccagagaccaaagggaatgatctggacaattctctcccacttggtcattttcaggtatatataatctgctgtaagccatagtattgttgtttgaattatacttaaattttggctgctgatcagtgattcttttttaaaaaaaaatttctttcagagaaactggtgtctttttttttttttggtaatgcatgcatatggcacaaaattctaatgttacaaatgaataataattctcccagccagccacaaatttcctcttctaggaagcaaccaccattaaacagtttcttgtgaattcttagatctgcattttctgatagctacaactcagttaagctacctataggagactttccacagacaggagctcactgtacgtgctgttttgcatcttgcttttatcactttgagtgtcctcaagagccttcctgcttggtccataaaaggctgcccctcctttgaaacgctgcgtccatgcggtggtagatgtgccgttgttcatatgaccagtcccttgctgacaagcattgagttctgtctggtcttagcccacatacacagggctccagtaggtgaccctgaacacgcatcagagggcacatgtgttggctgtagatctgtgggataaactcccagagatggaattgctgctttagagggtgtgtccattttaaatgttgacacacgtgcccaagtgctctccttatggttgtattagctcattgtcttcacactgcccattgcctcactgcctctcccctcagtggagagcatgctttgggatgcccatcagttaggtgaaaatggcatttcattgtacttttaaaagatactgttcttatcaggagtgaggttgaacgtcttttcctatgactcagagccatcagtagtgccttttctgtgaattactttatcttttcaaatcatttgcccatttttgtttggttgtgatccataacagtttaaattttaaaaatatctagttcagattgaagataaaggagctctgtctgtcgtcggaagatagcatttttttcattactgttcttattcatctgattctatttcatcatggattgaattatcaagtatgatcagtagagaagattaaatttcaggtcattggtgatatctactcttgaggtagttttgtaaatttacatgagacatttagaatttcctgcttttgtaatttcataggtataattatccatttccacagttgatggactatgtggaatgctatgcagcagttaaaagaatgagatgcaccttctgacacagagggtctccagagtatgttgttgaatgaaaaaacaagccagttgcagaaaactttgcatagcatgatatcctttatgtctgaaaactcagagaagacacctagtgcttgttttctttgtgtgtaaacgtgtttaaatctgtagttgaaggttccagagagacacagaaagagcatgctttctggggaagggactaaaactgggctggggtgtaatcaaaaagcacataaatcttggctgggtgaggtggctcatgcctgtaatcccagcactttgggaggctgaagtgggcggaacacttgaggtcaggagttcgagaccagcctggccaactgctgtaacactctctctactaaaaatataaaaattagccgagtgtggtggtggtcacctgtaatcccagctacttgaaaggctgaggcaggagagttgcttgaaccggggaggtggaggttgcagtgagctgagatcaagccactgcactccagcctggcaatagagcgagactccatctcaaaaacaaacaaacacttaagtcttaataataaggttattttttttcactcaaagaattatctatttgtgtaattaaaaaacagtgttttagaaattccatgggataacagatggatttgttcagtgcaaactggactgtgaaaggcagcttaaaccagatctaggcagccaccgaggggctctaagagagcggctgcaatttgtgaatccacctgctggctgataccagtttggcttctcagatcctgacaggcgaagactggaatgctgtgatgtacgatggcatcatggcttacgggggcccatcctcttcaggaatgatcgtctgcatctacttcatcatcctcttcatttgtggtaactgtatccttcaagccgaccaggctttgttgttgccgtcgttatctggttttgtttttcttcctctgcatttctctgtggtgatggtggtggtagtagttgtggcagggaggtaaatgcctttaccttattagctcaatatctgcttttcttccatgctgctgggggacagcgtcctgtaagcagaattccagagaggctttgagggatgcgctctggctaagagaagcaagcccagggaaggagcgtgagacagcacacatactggtcccagaggtcactcagtttggcatcatgtctcctgtacaggtcccgagggatggctgagcgcaaggccaggtggttctttatgttatcattattgggagcttaggcgtccatctgtgacttcctaagacccttcgtgactgatgagagccatctttgtggactgatctgtgctcccctgggctaatttcactttgctgatctgtccatctttgcggatcaagtgtccattggctagctgctaaatcatgctgcataacttctctctgccttactttaccccttttccctgtcgagaggcaccctctaatcctagacttctggaattggcccttagatctgtatttacctcattcagacccttcctgatcctatagcctttggttctcggtgttttatctccaggtcctccatgcctagcaccagacctggtacacagaggcctttaatgaatgtttgatgcatgaacgacgtacacactcatgatactacatctgggttttcacccttccattttaaaaggtcctaatctggattctgcttctaaggtggcccagatctctgtaggtgttttcttctttatcttgtctggctcactgataaattttcttcagtgtggtaacctcagtgcaaacctgcccccttttctacaaggacaatgctttgtgctataaggtattttataaaaaccccatctcaacacatatacatccttgtagtcccttgactcggctctaaggccccctccacaagagccacccctgccctgtctcccacccagagaaggttcttctacctctgagctccccctcagattttatccacgtctcttactgcctgtaggttcttctgtctactggatttttatttatttattattattattttatagaaggagtctcactctgtcacgcaggctggatggagtgcagtggtgcaatctcggctcactgcaacctccgcctcctgggttcaagtgattctcctgcctcagcctcctgagtagctgggattacatgtgtgcaccaccatgcccagctaatttttgcatttttagtagagatggggtttctccatgttaaccaggccggtctaaaactcctgacctcaggtgatccgcccgccttggcctcccaaagtgctgggattacaggtgtgagccactgcgcccggcctgtctactggaattttgagtgggcattcctccatctccctaactagatggataagcttcttgagtcaggaatctttttgtattcacatctctcaatagagtacgggatcttgcacatagttggcccttggtaaatgaaaggtcattattttctttttctgctgtcctatggttgactctttaggccacagcaacatcctggacttgaatctgcagagaagtattccctggtgcttgtctgtggttgcatgttgttttctttatagcacatgccactgtatcagaggtgcttagggagctgcttatgctctgtcttccccaactagagtagacattccagtgtgtggtgtttcttcctgtgccctcagcacccacaacagtgcctgacacattggaggtacttggtagatctttctggatgaattccagagcatgccactctttaggagggtctgagtaatgcctctcaatacagatgatggattttgctctggaaagttgttacaagcttgtaagatcttcctgtggctcatcactctggatttgctttccactacccaaaggagttgagtgtcatggcaagactagagagattattgtttcttcactgagatcatggagggaatactcagtacagctagtctcatcactagcccctgtccgagttaccattaccccaggcctagcagaggaatgctcatgttaccaagccatctccagcccaggactaattgcttcctgaggctcattgcagctccagttaaaaaataggccagcatgtcaaaggctttttgagtcttaatgtaattcacttacgtttctctcctctttaaaaccttgaatagattagtcaggcgtgctattccctcacagagatttcatcatctgttccttgttaggttatgttggtttacgtgttcagcaacccatccaagacaacaaattgcacagggcgtatgggacagtgctatgctgctcctgtctcggggtctctgggctcctgcagttttgcctgcagatggccgggcatcaggcagagagaagcatttgtcacagaagggggccttctcacttattgccctctcatccctgtgcttctcaaaaacatgcttcactgctagtgggtaagaaacaggcatcttctgatttaggagtcttgttcagaatacttgttaaaaacaaaaacattcaagaaagccatgtatacaacattagagtaagagtgaaaaaatatgataatttgttcagtcacctaaccttttattgtgttttttaactggaactgcaatgagcctcgggaagcaatttgtcctgggctggagagggcaaaaatcaagttcaggtacagtgatcaaagatcgagctgcagtgagactattcacaacagtccagcaccaggtggcagtaagtcagacacattatagtcagtcagtgtttgtggagtgaaggaatgaatgagttatctgtagactctgaaggttatttcaaaggagaaagtctcatactgtcttgtgcaagggcatcatcatttgaataacttgcaacctttgaagtggtctgttttggaaagcactcccctgaatatatatgttgtagttgtagtatgtgtttaaaaaaaaaacccaaactactttttaattataccatgtttatgttatagattgttttataaaatgtataacatagctatagatacgtagatgtttggacacacacacacacagagaaaggttgaaattagtgggttttcatgggttttagtgaatcttaattttacttctgtagactgtccttttacaggtttttacttttgttttgttttgttttgttttgttttgtttgaaaagcagggctctggtactctagttttgctgtgtgagtataacacttgggacggtcacttactaccagcttcccgggatgcagaggtgtgtggcgttgccattgttggccgcacgtagttgcatttagtagtgtgttgtgcccttaaaaagttgaaattagatattctactgaatgtcttcttggccatcgctgtagacaatttggctgatgctgaaagtctgaacactgctcagaaagaagaagcggaagaaaaggagaggaaaaagattgccaggtaaccctattttcccctgacgtgtttgtccaggggctgtgttgggagccctgcaacagttgcagcctgccaggcttacccccgcatcacggcagctgcagcccccgggttgctgctttgtggatcatggttgaccatgcactgcagaccaaaacggatggaatcttgggcagaagccaggctcttggctgtcatccctcggggctgagagtgggagtcacgtgtccccatgcttaaagaatcactgcagttaattttggtgtcataaaataaatgatgcattcaatgctgattagctctcagatgagaattttaataagatggtctgtgtaatgaatccatcgcattgagattaccaggaagctctgagtttgggttgtgctaggctcttgtggttagtgttgtttctaattaaattctgtccttcattggagcattattgattcagaatcctgattagcatttttatacagagtaacatggttatttggtttcttgtgctcttttctcttctctttagaaaagagagcctagaaaataaaaagaacaacaaaccagaagtcaaccagatagccaacagtgacaacaaggtatgtattctaagatgcttctcccctttttgtttcaaaatgatcctgttgatctccatacatgtaccatttacactgtggaagtgtcttgtgtatcattcttgtaatattttggtgtgaagaatatggcacaccatatagaccctggcttcccaggggggattctggttgaatttaggcagttagttgtgtttactgatatttcaccagaaaaccaatatgataaagaattgactagtttgaccacttatgttttctttattggaattgtgcaatcagccctgacccgtggtcaggatcacgttagcatcttctgagtgggtatgaaaatcgcggatttttaatagatgtctgtttccagaggtaatcccaggatcaggtggcctcagggctatactgtaaaactgaatcccatttatgacagccctggttgttttgttctttctctgttcatcgagttgataaatgcttactgagtggctatcatgtatcagacactgaggattcaggaatgaagaagacaggtccctgccttcatggggctcacagtctggcaggaagacaggagtatgagatgcattatcacatggtatgagtgaatgtgctggcacagggcaaggacagagccctgaatggtgctggctaaccacgactgggtcagggttcagccttcttctcacctgccctcaggccttctgtctgaagcagaatcaccatctggggacatctgcctgtccctgcacactcaaatacagatgcagctttggggaggaatccatgccctatgctggaccaccagggtgacttttcctctctgaagtgattttaagtcagtctcccctcctcccaagatgtctttgtcatcctaggttacaattgatgactatagagaagaggatgaagacaaggacccctatccgccttgcgatgtgccaggtatggtggcggaggccggagacgctggctttgctgtgtgtctttgctactgctctgtgaccacctgccgagtctgcggccagccagcccagcagcgtgcacatgagctgctgaggccaccaaggccgtgggaccagttagctcgcctttttcccatggtcacaggcagaatgtgtcactcaaattccaggtgatggggagggaaagtgcaggtgggtcagggcagtcccagcttctgctgggagactggtccaggaggccccccggtgttagcgctcacctgacacttttatatttgactggcacatttattggctgatgtgggtgggactgtggagttgggagcctaggagctgattgagactgaaagtcccacacagtttctcaggctagtctgagcgaggaggttactggggaaacagccaggtgttgggaggttggcagtgagaatctcagcactgccacctttcatctgtggtcagatcttacgctggtgggaatctcatcattcccgcaaactaaacatgctcaccagacggggacacttctcagcaccccccacccctgcaacacacactcagtccatgttctgaaggagcaggagggttttgattcatgtaagcaggtagatgttgttaaagtttaagccaaatttgcatgtgaaattaagaataattcaaacccatatgtagtctttatttcatgcctataaaaaaagtatttcatttaaagtaggggaagaggaagaggaagaggaggaggatgaacctgaggttcctgccggaccccgtcctcgaaggatctcggagttgaacatgaaggaaaaaattgcccccatccctgaagggagcgctttcttcattcttagcaagaccaacccgtaaatactccccttctagtctctcacggctgcctcttgccagtgaccctacaggttgcttgagggtggctcgggtgggggtgaggggaagtggttcacagccctttctgaacctgagtgtccctggcgccctcacccaagtcccctccaacccctctctcctccactgttgctcttgccctcagctcatctcttcctagctgcctccttcccacaggggtgtggccaggtcctgggaggagctccattctaggttctcctccctgccttcacccctgcatggggacagcaatggggaaagccttgtccaccccagcatattccagctggagctcactgctctggtgttccatgcttcggccagccgtggaaatttttcctaatgagtggatcttctgttaggatgccttgtgggatgagaatttttgtgaccaaggtccgcatagcatcctcatcctcatagatcccccacttgattgatcagttttcccaattgagttttatctttgtaaagtcatattgcacagtgatattttatgggttgtaagtattcagttcagctctatgatagtctacttaaaatagcatttctcatgttaaaatgataaggtgctcacaaggaacagggtaatgactcacaagtactataagaggaagacgtttatttactagctagtttctaggttttaaatcatctgggactgagtggaatgccaggggaaataaatggctcctggaaaggtttctagaattgcagaagtagttcttggctgtcagagaacaactctttataattcattggccctagggagacacaggtgggaagcaaggcctgctggcatcctcagagatatgaagatgtgatggtagcttttacagctcaccactgtttgggtgttctttaaaaaaaaaaggttattaaactgatattgctgacacctacagccctttgtgtgtgtgtgtgtgtttgtgtgtgtgtgtgtgtgtgtgtatgtatgtatgtatgtatatgtatatatatatacatatacatatacatatatatatgtgtgtgtatatatatatatatatatatatatatatatatgttgagggaatgcatttattttcacctaaagctacaaagcactcctgccctcactagcttggaagttctttcccagactcaactgctaaccaccttcaggtcctcaggggggtacgcccagcattaaataggcccaaaagggaggacttgaagtgaggggtcgccttacataaagttgactccagtttgaaagtggaaaaaatcttttccaaggaaaagctatctatctataatagtcttatagaatacaggaatacagataggtatatatacatatacacacgtatatactttagaatttaaacatatacatacatattttagatatacatatatacacacatatactttacaatttaaatatatgtgtatacatatatttatgtgtatgttttatatatatgttttatgtgtatacatatatgtacatatacatacataaatacatacatgtgtatatgtatatgtttaaattctaaagtcaaacattgagggtatggataaccagttgctaaccaggcgcagggcacattgaggacagcagcgaggttctgatggcccagagagccatcgtttgagcccaggtgtcaggcatgagccaccctccattgcttcacgagaccacaggacttggtgagaactctcatgccgggccatgagatccttgcatgttagcaaatgatgctccaaccttcactttctgaggactgcttgtgggtcaactccaaaatttaaaaaaataataataacatctattacaaaatctgcagacagccagagatgtcctgaagtctcagttactgcaggtcactataaatagtatgaccttgcacctgcaagacaagcctgggattcatctcattctgtgtgaactgttgagggcaggcctggcctcagtttcctctctcagtcagggaagataaacagatgagtttcttgtcatagtggaaaaacttcagtgatgtagacctggatcgattctgcccctggtccttactagtgtcactttagaattctcttattaagcctcagtttccccatcttgaggaagacaacaagccccacttccaaggacttggcagagtggtctgtgtggcacccccagcacagaggtgacacaccacccacagtccacaggttgcctttggtgggcttcgagaggctgacggacaggttgctcaggtgtgccgggcagggtgcatgggcagcacagcagacagctgccctctgcctggcctcttgctgcagtggccccacactcttaaggacccagtgtgttccaccctatctgggactgtttccaagcagcggcttttccctgcaggatccgcgtaggctgccacaagctcatcaaccaccacatcttcaccaacctcatccttgtcttcatcatgctgagcagcgctgccctggccgcagaggaccccatccgcagccactccttccggaacacggtaagtccccagggtggggctcgctctgggatagccctggcctctctcgggcagaggccactgtagagatgggagctgtggaggccctcaaggtgacagctagagtaggtctttccttcagctggggacgttggctgtttccggtttgtaagtgccagagagcttgtgttttagctgggtaaatctgaatggaatcattaacttagaacttcatcttaaatactctgcaggaacggtcagtgaattcagggagcctgcttctccgcctctttgctccctgctgctgatatttaggtcctcctttccctccctgctcaggtttacactcacccctgttttgagattcatgcctcgtggaagcacacagcagggaggaagcagaattcaaaccaggcacaccacatgcccaggctgtcttgttcagggttggaggcaagatgcctatgtcgtgtagacttaaatacaccaagctgctaggctccacgactcaggagaaatacaagttagggagatgataggatgtcaagttgaggtgttcagtggagaagaacattaggccaggtgcactggctcacacctgtaattccagtgctttgggggatagagggggaggatcactgaaggacaggagttcaagactagcctgggcaacataatgagacctaatctgtacaaaaaataaaaaaaattagctgagcgtggtgtcacatacctgcagtcccagctactcaggagactgagggaggaggatcgcttgggcccaggaggtcaaagctgcagcaagcaatgtttgcaccactgcactccagcctcagtgatacagtgagaccttgtctcaaagaaaaaaaaaagaatatataatgaatgttaaaaaatttcttctctgggaagatttattataaaatatgtgattatgttatatatttcacaagtatctccaaagaaagtgctgaccttggccccagatagccaatattaagtttgagtaacttcatgaagcagagtgcaccaggcagagccacttggacccttaagcatgttaacttagcggtttacaatattacttttcattggtagaattaggaatatacaaagagttattaattggctgggcgtggtggcttatacgtataatcccagcattttgggaggccaagacagtagaatcgcttgagcccaggagttcaagactagtctaggcaacatagtgagaccccatctatataaaaatttaaaaattagccacacgtattggcacatgcctgtcccagctacttgggaggctgaggtgggaggattgcctgagcacaggaggctgagcctgaagtcagctgtgttcacaccactgtattccagcctgggtgacagagcaagaccctgtctctaaaaaaaaaaaaaaaacaaaaagaactctagattttggtgtggcagaggtggctatccagttagccctctgtatccatgggtttggcatccatggattcaaccaaccacagatagaaaatgtttgggggtggccaggcgtggtggctcacctgtaatcccagcactttgggaggccgaagtgggtggatcgcttgaggtcaggagtttgagaccagcctggccaacatggtggaaccccgtctctactaaaaataccaaaaattagccaggtgtggtggtgcacgcctgtagtcccgactactcgggaggctgaggtatgagcagtgagctgagatcgcaccactgcactccagcctgggcaacagagtaagtgagactctgtctcaaaaagaaaaaatattttgggggaaaaaatgtactgaatttgtgcagatttttttcttgtcatttcctaaataatttacatggcatttacttgaccttgggtatcttgggaaatctagagatgatctaaagtctacaggaggatgtgcatagattatatgcaaacactacaccattttatatcagagacttgagattttggggtctgagagagtcctgcaaccaatcccttatggatactgactgtactaagaaaacaagtcaagggaccgggagcagtggctcatgcctgtaatcccagtactttgggaggccaagacaggcagatcacttgaggtcaggagttcaagacctgcctggccaacatggcgaaaccccatctctactaaaaatacaaaaattagctgggtgtggtggtctgcacctgtaatcccagctatgcaggaggctgaggcaggagaatcgcttgaacccaggaggcggaggttgcagtgaactgagatcatgccattgcattccagcctctgcgacaagagcaaaactctgtctcaaaaaaacatacaaacaaaaatacaagcaagtcaagggttttctattagttagttttgtaacttagagatggtgcccgctgactgtgtctgtgttgtaaggaaacttgcacctaaattggctcttgcctcagcagccccaccttagctgtgcagcttactcggcactgaggaccattcaaaggcaagacggctagaagcagcagcctgttgactctcaggcctagatattatcgtgcagtttcaggttattaccaagaaacccgaccagcagagggaggctggcgagtgtgcaagcatcaggtgtccctggcttgctggtgggcacctttttctgagcaccaggttgttagagattttagggttaagacacacctgcagatctgtgcctccaggactctgttgggacaaccaagcctcatgctgttgcttcccatttctggagcctggcaagccctacctatcagatttatgaaacacgcactccgatatgaagagaaaaagtgctttccccatggtgcgtgttagtgtcaatataaagaggaaggcactgggcctgtcttgatttgtcctcacagattagggtttttgttagagagggtttagttgctctagatgccccaatagaagaaagacctctgtgtcatttcattccatcataaaaaaaggacacaagggcagtgtttggaaaaaaacagcattaggtgacaaactaggccaggagctagtctaggattcgcattgacaagggattaatttacatgggggtttcatgtcttatttttaattataactgcttctccataagtttatttccctgctgccttacccaaaaatgttaccgttctgcttaaatagatgtacatatgtgtatgagtattgctttttagattctgcagtgttttgtatgttttttaaccttagccgaattcttagtttaaaaaagagagcgagagaatgcaagcagagtgagggaaaaaaacagcttaaatttcaacttcagccctggcgccaggttgccttgtagacttgtgggctgcagtgtctttctgggctactagatgctttccatgttaatattcccactgtgacctaggaaggagtaaggaaaagttggctgaggcctggcagtgcacgggaagacaccttccatagcctggccaagaaactccattacacagaagtggtcccacagaattcataagtccaaaaccagaaacagtttggaaagtgaataccctctgaagagagagactgggcttgaaacagaggtcctcgcattattgtgacacagcccccaggcgactcctctacctacaacagctcacccctgtgactcttcgctggcatacgccaggcctactccttgctctgcagtgcctgtgactagctgcgtggcctatgcgtgtgtccactccctgctcccagcagccacatctgttaaaggattaggcctgggtggtctccacagtcccttctagctctggtctcttcagttctttcaaaaccatagatcatagttgtcatgaagatcagtggccaagaccaactcgcctttgcagataagggtgctacggtcagaagctcctggtgagcagctttcctggtggtcagacttcttgctgctggcccacttgcctccatggctccgaggagaagcagggaccccagaaagggctagcaggactctgctgatgggataatagatggtattgtcaccaatgaggatagagttgcctggactgaaaattcaaagaccaagtcagtctgttatttgagtgggcccagcaaggttttttaaaaaaaaccctgagtttagagagagcagtgtgagatgcagaacaacgggcaggagtgctggagaccaccaatgcaggagtctgtaaaaccatcccttgcagacttagccagcccagcgcatgagcagggaagggtgctgacgccctgattacacaggctggaatgcgagggggcatatggaagctactggctccgacagatgccgctgccatcttcatttatgcttctccaccaatctgatgctcagatggagggcaacatacttcattcagccagaaacgcggttaaaaatcgaaaatgtgtataagcctctaatttatttggtgccacaagtcgtttgtagatgtagcactctctgatgagaaaagcttgttaacaaagcactcttagaaatgagcctctctgcctgtccaagacacaagactgggaagcaagtcggtgagtggttaaaggaggtcaggattctcaaacgctctttgggaatgatgtaattgaccaaagtgggcattcacccgtggctctgcacttaccttcagaatggcagggttttcctggagggatgggtctctgactggatcgggggtttctgcctgtaagcatgcagatgtcagagtttgtctgaattccttttctcactcccacatgttgtgccttgcagatactgggttactttgactatgccttcacagccatctttactgttgagatcctgttgaaggtaatgaattttccttgatcttcacatactccacagcagctggagcaataatagttgcacttctttgtttgccttccagatgctaggttacgcagactatgtcttcactggtacttttgcatttgagatcattttaaaggtaacaggttacccggcagtgtgtttaagggctgctcctgcgtgtgacacacaggaaagaagcgtggagtgcttttgattttttatgggttttttttttgtctttcgtggttgagctaagttttttttttttgttttttaaaccgaaggatttttttttcctgtgaccattccaacttgtttttgctctttttaacctttgaatgcatgtaggagccactctggcttcatgatagtggttgagaattacattttgctcatttaaaaaaaataccctctgtaatttgtcaactgataacacatatatctctatgtgtgaacttttttccaccctttctgacatcaaagtcagaggaaaagcatttatcctatgaagaggatgtctctctttttgtttctctgactgcattatgcttttggggacctaaaatagtaacacactattttcttgcaataggatttgcaagatgacttgggtctatttgtgttaaggtattttctgtctgttttaatggatgggcttacatttacacaaaaggagcgccctttggccggggtgacctaaatgtactgcccatgcatgagctaatggctgccattgctgcttgtggtttgtggactgactgtgaagtctgccccatggggagcccattccttatgtgcttagagtgctggagaccacagcagagctccaagaacctatccaaaactggccaagaaccacagggcgtgggtcattgtggttctgggagaacgtggcccatcagaactgtcagggcaaccatctcctagcaggaagacaagctgggaaatgaagacttttaaccatggttttctttaagccattggggaatttttgtgtgtgcaattcaggcaaaatgtattttgcatcggactactgtggaacttgggctctttacaaaatcttatataaaatgaaacctcaattaatatggtcagggaatgaggtggttagttttttgaggttggtttttttatttttttattttttggttcatgaaacagcataaagccaaccaacaactgtttacccctttcttaaaagtcttctaaaaatgtgagttcattttcctgcctttaagccgatgaatttggttgacacttctcctaagtcagaggtgtgcagtgggatggtgaccagctcttgttgatgaggcctctgtgggagggcctgtggatgcagaatgcacagtggtgggggtcggagggatgccgccagaacactcaccggctcagcttctgcctcagcttcttggttttagaatttgacttcttttcaaagtgaatggggagctgttctacttagtctgttagcctggttaattgaggttttattttactctccacattttttagttgttaaatgaatatagttacccttgggctttggggaaaattagacacaggattatttaaaaggaaaaaaatgattgttactttttaatttcggtagaattgcttcaccgacttaaatcttctgagtcattcttcattttgaaggtattttagagaatggaaaataagctaaaacaagaaggattcagaaaatggagactcaccaagaagtgtctaatatctgagacgatggttcctggtggccttggggacatttggaaggctctttggttatttgcttaagccctatgaaattgccatttttgtaggtcaaaaagggttgaacactggcgatttcataaggttcaatgtaatatttcccacctctacctctcttatactgtacttacctgagccttctccaaccttttttgttttaaaataaatagtgagctgtatatattttgctatttttactttggggaactaaactctttttccatcaccaatagaaatctcactgaagcacccataataggtgctccaggtacatgtggcaggtgagcacagagccgttgagactggctcaggtgagatgccacctggcttcctagccatgcctggcacgtgtcatcagacttggaggaattgcttaagatggatgcgtcattaaagaccattaggaacaataaggggcctctgtggaaaagtgatgtaggtccatagagcctgggagccctgaattcaagcccccactggaaaggcttaattgaaacaaggtaggctctaccagggcctcagaggggccagaaccagcactttgtggggaagtgggctctccggacagcacttaccttttgacgaatgtagtcctgtggagcctctcttagacaggctctttggacatgccaacagtgtattcatacttgaaacctgtgatcactgtaataaagcctaaattggtttcttcttttaaaatgtatccaaaataagctgcccctttttgatttttgtttgaagaaattatcctgtggctcaaccccgttggtttacatttctgacttcttaatgcacacttgttaatgaagttatactttcctcaagattttgcaaagagcccaggtttcttttcctttggagacaaaaaatggtaaatcatccatgattctgcttctagatgacaacttttggagctttcctccacaaaggggccttctgcaggaactacttcaatttgctggatatgctggtggttggggtgtctctggtgtcatttgggattcagtaagtattctggggtgtgtgcccagaattgttgggctgaatggtttatgtaagggattttaacataattgataaaggctgggcatcattttcatgattatatttagttatataggtttatttaatttgctcccattccagaaagatttaaacaattcatgttttcttgtgtgtgtgtgtttttttctttttgtgcctgctgctaagttgagcttattactgtctgtgaaatttgctttcaactgaggtgaaagaagtgttgactaggagggagggaatctaggttctagtcctggttcctccaaaggctgattccagggccttgagggcatcctctctcaggaaccctgtgccccttttatataggaggggctgggaccaggtggcctttcagtttttccagcttagatattgagaacttcctttgattttcaggatatagaacctgctaggactttttctttggcctcaaaatttttcagctaggagggagccaaggctgaaagtcagggccccaggtcttttccatggcatttagcgatttctggtgggaacagccattgctgagtactgcttaccatccccaggggtgtggggcagaggctccagtagagcatcaggtgtggccttgctttcttgctggcctgtgagcacttctgttcaggtgctgagcatagaatctcccctgtatgagcacacatgcacacacctgccctctaagctaaagagaagtggaaaggacctgccctcctaggaagaccaaaaacctctgcttggaacagccctttgtgttatccttctcgcctgccactgagggaaccctgtgatcatagcttggaaggccatttgcattaacatctttgcagctcctattaactcccaggctgttcatgtccaagctgcagccttgcccacttcctcctgagcatgtgttctggccacactcagccacctagggtaaagcagaaagctgcattctcttgtgtcgcatctttgtacatgctgctccctcacactggagcccccctccctattgtcctcgctaacccctactcctcctttgggactcacctggctatcaccacccccaccccagagtccttcccaggctccccctgccccacccccacaggttgtgctcccctggctgagcacaccacatttacccctgtcatgtgccacactgggttgggattgcccatctctccaccagactgtgagctccttgaaggccagagaagccctggtaccaaagtgctacagcagacctccaaccttaaacaaaaacaaatgatatatgaagcctaaaagccagctactacctagtatttacagtgagtggaaagaacaaagagagttcgtgagttgtgtctctgccaaggttagctgtgcacctgtcagcctctgtgagtgccatgggctgggcttgggaggtgctgcctcgtgtgggcggggaggagaagtcgcctctgagtcgtgaagagagatcagctcagcaccacatggatcccacgctaactgtgcagggatactaaagtgaagatccagtgaaagggtgaatctcaaagcatcctgtccatttataacacgctctgcctgccgtctttctgctccttccctagatccagtgccatctccgttgtgaagattctgagggtcttaagggtcctgcgtcccctcagggccatcaacagagcaaaaggacttaaggttttgattcctctcctcccggctgggctggcttgggttggggttggctgtaattactggctcttctgggcagagctgagctgaggcctgatggatttttaaagtgagttataaggacctttctaaccaattcagccacctgtgccaagtgctaatggcattttaaaaattattatttattgtctttatttttggtaattgaagatatttttctttgtaattattgttcatttattacctttttattagtagttctttgtgtttattttagtcttttatttagtttatttagtctttcagttttcatgtagactgtataaaaggctactgggtttctgttttcctgagtcatttatggggtggggaccctttgggcccatgtgccaggcagcactgcacctgtagcatttcttctttttttttttttctttgaaacggagtcttgctctgttgcccaggctagagtgcagtggtgtgatctcggctcactacaacctctgcctcctggggtcaagcaattcccctgcctcagcctcctcagtagctgggattacaggtgcacaccaccacgcccagctaatttttgtatttttagtacagatggggtttcaccatgttggccaggctggtctcaaactcctgacctcaagtgatctgcccacttctgcctcccaaagtgctgggattagaggtgtgagccactgtgcctggccaacacagaaactgtcggctgatgttagctcacctcaaggccaaaatcacaaagaagagtcacgcccctctgccctctccgcagcacgtggtccagtgcgtcttcgtggccatccggaccatcggcaacatcatgatcgtcaccaccctcctgcagttcatgtttgcctgtatcggggtccagttgttcaaggtagaggaactgcctccaagcataaaactcaggtggatttctttaaggagaagcctgcatttacttaactgcctgtctattttatacccaggggaagttctatcgctgtacggatgaagccaaaagtaaccctgaagaatgcaggtgagcgtcctgagagtggagtaggggacttagaagagcaaatagcagacttcaaggattcacacatgttggcacgtcagaagttttggtcgtgaaataaaataggcctgtgtgctcagcttgtgggtagatagatggtgtttgtttttcattgaggtgaaattcacgtaacatcaaccattttcagtatacagttccttagcatatagtatccatggcattgttgtgcaaccaacatctctatctagttgcaaactttttgtcatcccaaaagaatggctagatggcttttgtggtggagaatctataaatgatgggagttgggggaaccctgaaataacaattatgaaatgccccaaatagcttccatgacagccatgtggatgatttccccaaatcagaatttggaactcaactccctggtgtttgggaactggctccctcttcttatacactttctagacttcctctctcctggctcctattacctacatcttggccatatttccatagacaagaactggcagaggagagacaaggtgggagatattcatgcctcccattccaggatgtccagtgaccatgaaggcagtcatggaagccattgcctaaagtttcagactgtgcagaggcctgtgtctccccacccgcgagagacataactgactgggctctggctgactgtgcctgtacattggtttggggtttattttaagcagaaggtgcagtcagagagcaccaattgcaatttggctgtgtctctgcacctccagaggcaccgttcacacaccgttcatggcgtccctggaggtgagcagcctggcattggcgtgaggacactgtttcttccctcttgaagcctctgtgtcttcatttgtaaaataaagatattgcgctttatctcttgggttccttccagaaatgaagttctgggagaaataatttgccagaaataatgcaattctttcggaaagaaaattgggaatgtcattagtaagaagagaaagggatttgattaaaactaaaatgcaggaagagtatacgtgggttcgtttcctagagcctacagagttctctatggctgagctttgatccttcagagcgcgcctcaagcccattgtgtaagagatgctctcaccatgctgtggtttttatcggccaacgacgtatgcccggtgtctgggtggctgctctggagaatacacgttgcactggtagttattcaatggttatttgagccgcgaagtagattaaatggagggcgaggagaggagaaacggcgccggtgttatgctcagctgtgtgacaggcgggcggactgagtgtgacctgcctggaggttggattggggcagtgtgtccaactttacgctgcttccacctgtcatgtgtgaagccagacgacccacacctgttttcctctccaggggacttttcatcctctacaaggatggggatgttgacagtcctgtggtccgtgaacggatctggcaaaacagtgatttcaacttcgacaacgtcctctctgctatgatggcgctcttcacagtctccacgtttgagggctggcctgcgtaagtacagggagcacacagtcttctggagaggcacctgcgtgcccagggctgagccctccctcctggagtcagtcccatttctgttctccagtgtcgcaggattgccctgtggctttttaaccttgggccacttctcagtcacttcttgacccacagggcctctttctgtgtaggtggatgatttgtgaagcagggttggtagaggtgcctggcagcatctctgggtggaagcagggaggcctgagatgcctcagtcccatgaactcccattggatgtcaggaaagctgccatccgctgctcccaaagagggtctgaatggtgtcccaaaccattcattcattcattcattcattcattcattcattctaatatattcccagttgcggacagttgctgttatgccatctcttttactgagcacctgctcgctcatttacagaccatgctgtgcagaggcttgtgtctccccacccgttaaaaatgtctaactgggctctggctgactgcgtgcttagataccagctctgtgcaacatggcatgttaggcactgtggaggaaacagtgtctaaacatgcttcctctcctcaagcccaaatcaaatcagtgtcaagtggtcaaaccaggcaggtggtctggtgtgtcctagatgtgcagaacagggtcctgaagaatggctaagatgttgatgggtaaagtaagaagagcaggtaaggagaagttagaatttgaaagggagaatcctctgtgctttcgtgttgctctttgcttctggagctcccacccccagctcctgccatcagtgtgcaaacacacctagagtcctggatacccggtccccatgcatagatgagctgcaggaggtgggcaggctggggctcgcaggccagcagagttcttggggtgtgtgtaagagtcagatattttcaggagctcctgtaggataaagagacagtcaggtggggcttgttcattagggatttaatcctgggagaacagaggcatggagtaaggcccttcactgtgtgcaggcacaggctatagtgtcaggctttgaacactgtacttgagcaaatcatggtggcagctgaggagaaaggagcaaacctgggactcggggcttggaggaactggctcaactcctggctctgcccccaaggagtgtgactgtggcactttgatacctccctgaatattcctatgatggggatgatagtaatgtctgccttcccagatggatgtgaggattaagggagaggctgtgaaagtgtctcgggaagcctatgcatgggctgggtgccccagaagtgttgaatctgcatcagaatggggatcaatggaccccaagggtgttacagtaatccccctcttcctgttaagagttccgctaggcatagctttaattttagtgcatatctctgtttggggaagcacccttagttctttggaactactctggttggtcacttactgtcttgccagtgtgcatagttttcacttcctccagtgtcttacacgtgatattcttcctctctgaatagaaaggagtgttttaggatatttgtgaaatcttttgattttcagttcctcagaacagtccctcgatgatgatatcctgggtgccccctcctcttagtgctggctgtttgggcctgaggctgatgggagagacctggttgtgtccagcagccttggggtgggttcccagcgagtgctcatgagaggagttctggagagggaggacctgggaaggcagcgggctgggccgtgtgggctggggggcttggcaggtcctcacttggtttttctctctctaggttgctgtataaagccatcgactcgaatggagagaacatcggcccaatctacaaccaccgcgtggagatctccatcttcttcatcatctacatcatcattgtagctttcttcatgatgaacatctttgtgggctttgtcatcgttacatttcaggaacaaggagaaaaagagtataagaactgtgagctggacaaaaatcaggttaaagtcacacactgttttggcttctgtcccttggtcaggagcggagtgccttctttattgactgatttcccccatacccagagaagggcacccacatactgtctgtccctggggctagggccctgttctaagcacaccctcagcccatttgagtcatcactgctgagcgttaggtttcccgatacatatgagactttgtaattatgaaatccatcgccagacctggtggtatgaaatcagagagtgcttacgccacctgccatggtcatgacccactagtgatgtatcagaatcttagttggggtgctgtggccactcacacagacattcacagtccctactgggagatggtctttaaagccacttagggcagtttcttacccttggtgctattagcatttcagtctgggatgattcttggttgtgtttcctgggctttttaggctgtttagcagcatccgtggcttccagctgttagatgccaatggttcgtcttcccctggtagcagtaaccaaaatgtctccagacattgccaagtgtcctttggggggcaaagctgccccttgttgagaactgctgaccgaggggggaataccctgcatcaccccagggaagtcagtaactttgaatttgggactaagattgtattggcatcattcttgatctgacaccgtgttttagccagtctggtagaagtaggagccttttgctcgggtgacgtggtgaggagagggagccctgtgctctgggctatcttcctacacctgcactgtgaccctaggtgccctctgatccctgctggggcttgatccctcatctctaaatcgagggcattaaggagctgctctttagagattccttgcagccctgaaagagtctacaagatcgagattcttttctgggagtttccccgggtcctctatcagtagcatctctgttttgatgacgacgtcgcaagcaagaatgatctggtagcctaggcttcctcagaggaagtggcccaggcacggcaagccaaccatagctggctgtacccactgggaaatgtgagaacatgccggtttgtgtttgcaggaagattttcctttgagttgtcagggtgtccctgtagactccaccagtgattgtcagggagaggtctggcccagcaatttgctcacccaaggaagaggagtgtcagagcaaggccaggccagccacgcagagccagcgctgaaagtgtgtcagcctctgaggtccagcacaggcttgaattgggggtccctggagtgagcatgtgaggtcagagcagcgccgggtcccagacactgggaacctgtccgaagcctgcacccagagtcaaagcaggagagcgggggtaggtctaggctctcaatgctgagctgagggctcttggggctagaggttccctctgggcctgctgcagagggtggaccagccccactacccagagtaagtgagaaagtgctccagctgggtcccaacctgtgttcaatccaattgtcactacagtgctccagctgggccctaaactgcgtccaatcaatccagctgtcgctacagtgctccagctgggccccaacctgtgttcaatccagctgtcactactgaccacatcctagggattctgaaatgaacacaacaagctccccagcccagaagctccccgatggacatgtggatagctccccataagatgtgtattgttaacacactctggctcctgaagggtatctcatgtggttccaactgggagcatccaggaggctactagtcttggggaatgagccagcccctctcgttcttgtgagtttctgtggttacttggcctcctttcctggaggacagcacaggcaggggaactataggtgtgatccacctatagatcccccgtatgtgtgataaagaggaaaggcagtgataaggcctggacccagtcctcactcctgcttgtgtatacactgcagggcctcaggaaagacagctaaaagctctgagcctcagtttttagtaagcaaaatggaagccacatgggtaggcacccagcttacccggagcttgctgggagggtcagcgaaggtaatggaggcagggccctcggtgactcaagagtggtgccagcagcaggaagggggtcactcgtaatcattttcaccatcgtccacggccccttcccgggagctgtagggtgagctctttcagagcagatgaccacggggtcctccttccctgcaagtgctcagaaccccgtttctgcccttttctgctgttgcagcgtcagtgtgttgaatacgccttgaaagcacgtcccttgcggagatacatccccaaaaacccctaccagtacaagttctggtacgtggtgaactcttcgcctttcgaatacatgatgtttgtcctcatcatgctcaacacactctgcttggccatgcaggtaaaaatggagacagccgtggggatcaggtccgggcattccgcacagccccgtgccccaaatgctgagggtggaatgctgcccctcacaggaggggtttgatttttctgatgagtctgggctataggttggccagagttctgttctggctgacagttgtcacggtaggagtttaagatagttcttttgttgaagaaattatccgtacagcatgatggtaggtaacatttccatggagcctggcattggtgctcaattctgtaaacatttaccatgggcctcctgtggccagctagtggttgagaactacagctctggagatacacagctgtttcaatcctgattttactctgaattttttgtgacttggggaaagttgtttaaattccccgaggcttgatttctttatcagtaaaatggggaaatctgtcacacctacgttagagataaggtttatgctgtagataattcccctcagacactttgttttttattttttgccttttgtttttgaggcagtctcactctgtagcccaggctggagtgcagtagcgcgatctcggctcactgcaacctccgcctcctgggttcaagtgattctcatgcctcagcattctgagtagctacgattacaggcatatgccaccatgcccagctaattttgtatttttagtagagacagggtttcaccacgttggccaggctggtcccgaactcgtgacctcaggtgatccgttgcctcagcctcccaaagtgctggtattacaggcgtgagccaccgcgcccggcacctttggacactttgatctgggcctgtcacagagtaacactcaatgttggaaaacaaaacataagtcacactcctgtcctcaggtggctctcagcatggcagtagggaattttccagttgatgaagtgttgagtttgacctgagttacagctacttcttattccagtgggggcaagaaatgcaattgagtttaattggccaagtcagattatagtatggtattaacagcgaatgttttcaaaagttacattgcctagtagatactctacgaggacaggaagcaaagaccaaggtctagagccagcttttgcactgactttaagaactccagcacatcaaaccagctctcagtgctgtctggacagtaggtctaaagatagggataaattttctggcatttttcttaacctaagagttctttttgaatgaaaaggactgtgtgctgacgtagaagaaagtgtaaaatcaagaaaacactgccttttattcaacataaacttacatggcataaaatttatccctaaccaaattctacctctattcatagacattttggtggtatctgcattgtgctctggtcaaggccctcaacataaagccctgccagaagaaagggtgaattccctttatcctgagcagaggaaatggatatgttttcccccttcatcattcaatcatcctcatcttgtcacagaccctcctgcactttgtgggagttcaccacatgaccttgcaatgccggtggaattgcccagcgagggtgctgggctgtggaggatgcccacaggggcacagagggctgggagcctccatgtgcaagcatgtgagatcgtggctgaggctctgagaacggtccctctgtcttcatccatagcactacgagcagtccaagatgttcaatgatgccatggacattctgaacatggtcttcaccggggtgttcaccgtcgagatggttttgaaagtcatcgcatttaagcctaaggtgagttgcagaacccacttttcaaaggttgttgctgagtcaccctagagaagtacccgcttcctgttagtcttgtgttactgaattatgctaaagtgttctggccgctaactgggttaccacctgagaacattaaaatctgattagagcatgtgtgtatatatgggaaaatgaatctgcaagaacaaaacctcatgaaaacaattctgagaaacagaagcagggagattagaattgggaatttgtaaactgcagattattttgaaagccagttttctgtttctagaatagtacatatcatgctgtgtcagggaaacctgcctcattacttgagcactagagaaaatgtttgaacataacccatcagaaagaatttgaccctgattatactttcagatatctagtctaaagactttgttttgtttgttcttggtctgcagcatcctttttaccctttaagggaagtgctgataccagctgcagacctctcacagccataccatcttttgtttgcttaatttagaaaaatttcacttgactttaacacaaaatgagacatgaaatgtgttcaactgtgctcgacgactcagcgtgttgtacccctttgggagggagtgaattcagttccccacttgtcagtggctgccagatgaggggcagtgtagttcagtgtcaaattgcatagttgtggaactggactggattcaaatctctactctggcacttacagctgaaacaagttcctttcttccctgcgcctcgacttcctcacccataaaatgaggacgctaatagtgctgtttcatggggttgtcatgaggagtaaagagttcccatatacgcactgcttaacagagtgcctggcatgtagcgccacgctgcggactgtcggccactgctgttcctacccgcaccaccaccctcatcatcatcaagcaaggatgttccctcattctaaaagcctagacagaagagccacaccaagctgaaatgtgggatatttggccctcattttctttcccagtacagccaaaaactctcagagttagagatgacagagttcagtgacccagttagttatctctgtgtaaggtatctgacgacactgatttaattaagttaggcatggattatgaaatggatggtttcacatactccatagttacatgaaattctaattccaaactgttcctttctttaatttgaattaatctctatgcaatctttatcagatctttgtggaccaaaaagaaaggacatttgtaagtgattaattggggtgattgcagtggggtcaaatttggcacctaatgcatggccagatgttattatctactgtgacttgtccatatctacatacataaacatttcctccttttccaaattcatcttaatttcctttgagattttggtttgcttccctctcacctttacttctttgaacaatatttgtctggactgatggaaaaggttgcaaagtaagaacatcgaaggtacttgagaaatgcaacatggaacctctctgtggaacatttcccagatacctgggccatgtcttcccttgccagatgattaagctctgaagtttttgaaagcttgctctaggctgaagagaaagcacactcacccatggtgtgtatgtgtgtgtgtcagtgtgtgtgtgtgcacatgcgtgtgtgttcatgtgtgtgcttgctcccttcagccggccagtgcattgacagcccagtagtgcactgcccagtaggctgacagttgcccagaagatctccaaacctgggaggagagttcagtagcgcgtgaacagataggcgataccaaagggaagtgagtagctaagctataatcagtactgatagatcggagtttttaaatggttgatttttgctggaaattgtactgcttgtagtttcactcagcaagatatcttcatagcattagacaacctcacgttacaattgggagaacttttaagacagtagcagcagcatctccacacttgaagagcactgtcactgcgttccccccggccaggggaggttgagtttatatcgtgtgccgggatgagtgggagagtatcggttcaccaagaagcaatgccctccttaaaatttttcctgccctttttttcttgctcttctctttggtgttcacaagcccagcccgagcaagtggtctttcacaaagaagccagggaggcctcctccctcctggtcggtggggtagtcgggctgaagaacaaggttgtcaaggctgcagaaggaggaatattctgaggagatggccacatgggacctcagcctcctctcaggagagcctttgtctcatgggaggagctttgtaaaagggtccctcatggcagagttctccactgagtcaggtacaccttctagcaggactcgtcagtatctctgttaggggacacaggctggcagagtttcagttgcttcataaaataagtatagaaagtgaggtaagacaaaattcttactggtaggtgagaaggcatttcaagagggaacggttaaagaaagttgagaaatctgaccttaaggacttattttatgtaagggagcttgatggagaaactgggcctcctaagagagtatatttagagggaaatggcccaaggtcatgggagatgagatgacccagcctctgccaacccagagggaggtgggaagtagacagagggagaaaactccgagctggaagcctccatgatggaagaggccatctcacctcaggggaggaggcattttggagcactggtcaggcaagagtggaaggtagttaggagccgaagcgcaaaagcatccgggaaaagcaagcaggtgatttagccgattgtgggttcccgaagggaaagttcaccagctgggtgttgacctggtgcagcctaggtcctgctttcaacttggggtcaactagacctctgtagggttttcaaaagcaggccctagtttaggtgacacaagccccattctccaagcctttccctccagctgctagaattctccaacaagttctcttgctccaaggaggaagattgattaagaagggcctttttcaaagtgctggctgcagcaggtatagagagcacttctgtggagtaagaagagcctggtctgtctgggattctctttgtgggatgttacccatctggcgttttgtccaggctgcattctaggccatgttgtttgctgcggttactggccttctccagtgagccatacttcgttcccatcttagtcctttaaagtgttttgatcttgattctaccctgaaaatatactaatttatactcctagctacttgggctggaaaaagtaaggagaaattaggtttggggaaagaagaaagtgttttggtgctgtcctcatgctgctgtgcagagctgatgcagaatgggcactgagtcctcatctgccttcaagggctctgttcgctgctccagggtcccttgcaagagtagagcttcttcatgatcttcctagagtaccttttccacctgctggagagaaaatttgacactgtttttttttcagttcttcatgaccccatctgttctagatttacttttaatggcaaataatacttgaaaccaagtattactgtccttagaactttacattgggcttcttgttgggctccatcctgtccttttgacattgaggtttcccagagccctctcctggtccccttcttgcctggtaagatgcatacatgccagagcgtcagtggccgcctctgtggcatgcagacctgcactgcccttctctctcctgagcttctatgcctccctgccttcaaaatgatctccctgcctctggcctcagcccttctacctactccctttgtaagcccaaagctgaccagaccactcttgcagtgatattttggcactggccacctattgcttgagaaagcatatacaattttcttagtcgaatattcaaagtcctccatgaagcactggcccctgtatatttctgcctcatttcctgccattccctccctgctatttcttcgtccccaccccatccccaggtgttggcatgctagacctttccctgcccatgcgcctctgtctagataccctgcttcctctttgttatccttgaaggcctgtgggaaatgttatcttctctgagacagcatcctcaccccagccagagccagccctgtcctctgctcatgcatccgttgggggcctactatgcaccatcgttaccaacactactccatgtctgcctctctgtttgttggtgagcagctgcttgaggtctcaggctgagtcttctgcttctggctctgtggtacctcacatgatgcctggtggtagcttcctggtggtagctcagtaagattggtggaatgaagaaaggaataaagggatgatcctggaagtgcagcctctgggcatgagacgatacctgcttttctgtcgcagggtatctgggtagagcagagtggagcacatcttcccttaattccccgcttacctttggaaaggcttttgctagttagaaagctgtcaggcatagtttctaccaaaagttggcactttgggttatcacttgggtcaaatgctacccaaataatccctgccagcatgggtaagagatctggctgccatgatcaatgacaaaaggcacattatttatataggcttctaccgatctgcagatgggagtgaatccaggcagcaaaaggaatctgaacttgggtcacttttcttgtttcccatttgcaaccgttccacaaacattgcccccttaccatgtgcaacgcctgtgccatatcctggcaagagggccaggaataagagatgtgccttccaggagcccactgtccagcaggagacaaacattgatggatggtgacaatagggttcttagacatagtggtgcttcctgaccctgaggcccacattagtctggtttatgattttaaatttccagagtcagaaatgtttctgcgcaatacatattgcatgtggctgacttgtttggtcttttcagacaggtagagctggacacaaaaataatatagatttgactgctggttccacttgagaggttctggcctcagaattcagttgtaggagaacacatcatcataggccaagaggagagagcagggagaggggccctctgttaggagccgtgtcatttcttgtatcttatcttctggttacaaaggcaatatggtgcctttggtgggagaagggtgggggaactgagtcatgccacttgacggtgattttattaaacaagaggctactaaatagggaaacagtatgtgggaagaatgggagggctgacattttctccctcccctggactcctgtcagagccacctggtcagagcctgtgatttcagccacctgccttctgcttcctagattaagggtgtcaaccttcagtccatcaatcattccaatttgggcacagttttatgagtgtgaggggtttctggagagagagtcaatgaaattgccaaaaaattccaagaccccaaggaaatattaagcccctattgtgttgatttaaacggattttatccatcacagtgcaccagcattgagaatatcttataggctgatggaaatggcctgaaggggagaacactgataattctggagagagggagagaggagctgttcaggaataaaatctcaaagtcagaggctggcctccagcacccatgtggtgggtttggcctttgggaaatgacataaataatggagagaagcggcgcacacggtacaaatgcaggcggggctggggcacgcaccacagcaggtgcgaagggcgaacgctgggtctcctccgccttgtcagtactctggaggtctagttgctacttgtgaccaagtttttgatcaaggtgtaaattccttcctagaggggaggggaaggatcactgtgctttctttagcttttgagttactcttaactccatgaagaaaagggcaggctctgcccctccaagtgtggtctgtggcactgccaccagtcagagaactgcttgttatccattcgcaacaagagctgtcagctctaacactaagcacattgattcagctggctttcttgttaggagacttcttggacgaaggaaactgctgtgttcccttacaacctgaggctagctcttgatctcacctctgactgctagtctagacctcaaaggcagcccatctctgctcagttttgccagccaagaatcatgaattcatgcaaaggaaagctagaaagcataagctgtgctgtttttaaaatagcccttcccattagacttttatacatagatcatcagatttggggctcacaaattccttttgtctgctgatagatgggccagggagggtagcagtcagtgagggtaaaatgggagagaggcactgtgatcatagggcggggagagaggtggagagttggttagaaaccacggcggttgggtgggggaatcttacattattaagattaaatttaagaagcaaacccgaagtcagtgtcgtagctcccccataaatgcacctagactgatggatggtgactagaataaacatccctactccagctgttaggacagtcagtacgtccacatcttctatactgtcgcaaaaggctgtggttctgcagtggcttcttctgggtctgtgtttgatcacaagtttctgggacctgacacctcaaagtactttttgttctggttttcttaatgcagcactaaatgtaccccgttgtaaacaggctgggccccattttatataatatgtacctgaattttcatttccaaaaagcgtccagactctttggaaaaacacagttggtttatagacagagctgttgatcttgacagtcagtccgttgcctctttggctgtctgtgcagtatctccccaccaccctctccaaccgggagcttcccaggggtgtcgagagaccacaggcactcatttagcacctgctgtgctgatgctggaagaagatgtaaaatgtccggcacatacatatagattttaagttacaattgtggggatgttgtaccctcaaaattgttgcaagatagcaggacctgaacaaacaaccagacaaagctggatgacaggcagggtgcaagttggtggacaaaggggacattgcccatgtcaagcactgactgggttcaaggctctggctagataatggggttagggaagttgggggactgaatatgcagcacagtcatcatccttcagggcttttgattggtagagctgcagacaaagaccccacattcagccatcagtacgtaagagattcagcgtcagcctgagggagtgcagacagccgggactgcgaaggttccatcagggaacatttatctgaccttgaagaagggtgaagttgaacagatggagttggggttaggcaattaggattgcagagacatcaggaggtggggaggaacctggtgctattttcgaaggatgggaaggactcctctcagcctagagggtgaaaagtgggagggaaagaaagcaaaagctgagatggaagaaggagcctattggcttctttgaaggacagagggagccctggaacatcctcttcattccatactcttttctactatagagcctgccttgacttccccacactaagcaccacccccatgacaaggagccagtgtctctgccacgacgctgtgcctcacggtgcctgtgtccccgtaagccattatctacccgtctgtgtcgtctacactgagagttctttgaagacagggacttgtctcagtcatcctgccacaaggcatggcctttgtaatacaggctggacttgcgaggactggagagcattgctggcccatttgaaggagcacagaaatggaaatgtgtgcaatacctggtgacagtgctctttaagtggggtgaatggagattctaaggaaggagtccatcagatcgtgagggtttgggatcatccctctgggtaccaggacaaggttgccaaaatgccttcctctgccctgtagatatcctgcttggtttggtgccactcaggaccgtgagtgtgtgtgtgtgtgtgtgtatgcacacgtgcgtgtgtgcgtgggcgtgcaccttctctcacacataaaggtgcacaaccaccctgctgtgcccctttccaccagtggacagtattgttacttcccctttggctttcccaccctacctgggtgccatgggtgcggcagggactcggattcgcccctatacggtccgtgtggtgggtcattcatacatgctcataaacatctgccctcgcctgctctgtccaggggtattttagtgacgcctggaacacgtttgactccctcatcgtaatcggcagcattatagacgtggccctcagcgaagcagacgtgagtatgcacctggcgtggccgccacctgtgtcctctctcctctgtctgtgcatactccgctccctgccctgcagtggcatcacctggacaagtcacagatcccagtcacttgatctgaaactaggatttcctaatgagagctgtaggcaagacgtgtttcagggtagagccttatcccagggccttttgtagacacaaatcaccttttggaggacaggcctttttgcagcatttaccctggtcactagtaggcaaggtaagataggatgtctctaattgttttcatttgctgtgtcagaagtgatacccacagtggcgtatctataacatgtttattttagggggatgtttcaagtcgccgtgtggcgcgatgctagaatgttccccttttgtaacactgtccttttcttcttttttcctgtggtgcttcctctcctctgtggcttctgaatgcttgccctaacagcactatttcactgatgcatggaacacttttgatgccttaattgttgttggtagcgtcgttgatattgctataactgaagtgaatgtaagtagcaaactttgtgtcctatatcatggttgttttcattaagtctgacatagaagagactagaggccctgcccttaaatctccacacactttagaaatccagacacaaatttattttgaaagactaaggataatttgtagtttcctctatctcaccccatctctatctccttcccctgaaaaagagtggggaagtctatgtagaattgccttttggaactagaatagtatttcaaaagatctaattaaagttataagggctgggagttaattgtgtgtccgtgtgaatgttgtcactcaccagtcgtgtgaccgtggaagtcatccgagtgctatgtgcctcagtctttccagctgtacatggagttactgatgtgcaccctcgtccccgcaatggttctgtgagggcacaggcaggagaccccacagccagctatgccctgagcctgtggtggctgctgctggtgccctcacctgtaccgtgtctgctctgagtctgactggtgacactggtgaacgtcccacacccaaagggtgatgccagccagtggaaggctgcttggggccagggaaaagagggccgagtgcaaaccagggagagggtgtcagtccgcctttgttacatccagtagattcacttgagggggaacaagtgcagtagtggcattgtagatggagtgaaccactctccctagaagcactctgagcacctctccccctgcaaaattaagaagcgtgagaaagggagcccctccttctgcctggctccccttgggtctgacccatgctagaccggaaggcctcaggcaggcagaaagggccctgtctacctgatctgttcccagttcatcagcaagtcttagtgggcgtccagtgtgtgtgccgagcctgtgcagagcctttcgagagagtgggcggagcacggggagggactgttgtgtggtattggcttttgctccacaatgtccagcccaccccctgcccctgatgctctgcctggtgacatctgcaggattgaggattataaggtccatcctggtgcccagacagcctgcatcacacaaggactgtgaaatccctgtatgccacctatctgggtccatgctgatcctggcgtgtgaatagtaagacagccaccagcctggcagtcctaagacctggcagttgcagccctagttccaaactgacttggattccagctccctcatgggccaagtggggtgaataacatctgcccccttgctgcagatatgttatagtgataaaatgatcggaatattcgggaaaatgcttgctaaaaaccccaaagttttagggagatacaagttttgtattattctaagtgtagattttccctgtaataagtaaaacagactgtcagacgtgactgtgcccatgagggtgtgatttaagcctcgtcatgccacgctatgaccaggcactcagatggtattttgctagacctaggtatacacatattccaacttctaaagcccagacatgtaaattctacttcatgtgaaatgttccatgtgtcagctataaaattgccattcagatatgtaaatgatgcttggttgtaaaataagctggtgctaatgggagaacagcaggtccctaactgggctgccctgagctctctccgaagtttatggctagacatctgccaccttaatcatctcacaacgcaaagtgcttacaatctactcggaggtatatttacatgaaaattctggaacatacccttctgtgagccagagatggcctataatggaagcgaaaatacaataaaccagcagcagggcagatctccctggactgctcagcacttcaagtgctgtgcaggtggtgggtgtaaacacttagcttccgggcaccaggatgtggccaaggtctgtccacctggggacacccagctttctcacgcctgacctgcctgctggctggcaggggtgtagcacccatgtactcagggacagcacgcgcccggcttcctggctgcctcacgtgtgctgcaggctggccctgctcctcccgctgcccctgtcccctgtggcccagctttgctcatcagtgtatcagtgttgctgtgttcaccttgcaccagtcaggaaaggggcaggtctacgctgaagtttctagttagcatttgacattggggtatctgtgcaacacaggctttcagggggccccttcttggcatgcaattaaactttcaaaatcacctaggcagacactcccatagtgtgctttcagtcagtgacctttttcctggtcagctgtggcctgagaccagatatattcctcagccatggcaatgccagttccctaccccaggccagcagaacaccaccttcagaaatctcagtgtctccttgctgggccttggaacagaggggatgctcaaggccaccttcacatttattccatctttcaacacacattcactgggcatctatcacttacaggctctgggctaggctgtggggaggcacaaagataaaaaaggactgggtgtccttaacctctggtgtaaatacatgacagtgggactgttggttctgacaccccactcccctccacatgtagttcccctggggagcagtgcacatcacatccttggtggccttgtcccctgagctgaggggtcagctgtcagctgggtgtgaacacctttggttcatcattggctggttgtagctgccataagtcatcattgtttgcaatgtttaacctgccatgctctcttccccaaactctgttgatctttcttttctgttgcctaattgattttcatgttggttttatttttagaaaattgtagcggcaagtatatataagcatatatacggtgaagtccttaaagcaaagcacttctaaagaatgtgtgcttgtttttggcctctccacctttggttttcactgcgctccacaggacgtgctaaggattggttgcaatcatctaaattgttccccatcccatagattgtcatctccagcctggggccatcttggtcagtcacacttggctctgtgacttgccaacatagtcttccagaatgaatgatctggctgagaaatgattgaattcagcctgcgtttgtattctttgcaaaaacgttttgggtagtcctttgcatggtcctgcctgcgcacgcaccagcctgcttcatcctactgtccccctcccatgtccccacaccccgctcagttcctggtttggcagcactcatggacttatctccatcacatttggtcctaacctcaccaggctgctaaaatgacacactgtgactgctgggctccctcttgctccgtccctctttgatgcctgtttgttccttgaatgatgaaatgacccagcaacatactgtccctaacccatggatggctgtcactgacatttgtctcttctcattatcattagtgtctgggaggcaaaacacttgtttagaagctgtatctgccttattattacttactttgaaggagcaggtaaaaagtcattagggagctcactctcagagatccaggaatggtccctgccttttaaggtatgctgtttggaccaggtggctgacagtctcactcatcttctttttctgaccccacagtaaggttgtgtagtcccccatttcatatgtgaaccctttcccaggagccagctcagctgggcactgggttgtggacacagacccagcaaccccaaataaagaagccctcctcccagaggtgttacctgtgagctcagaaatagtcagagggaagactggcttctccgcaatgcctcgggttacctggcccagctgttctgggatgctggtttgcttcctatctgaattagaaagctgcatcctctcagctcttccaagcacagatagaaattaaaacagaaaatgaaatggactgatttcattgatttcacttgggaacctcagggtctttttgacttccacggttgcagggggctgccccagagcctatgtggtaagagcctgcttgagagccctgtgggaagaggctcgagggaacatcagcagagccccaggaatctaaggagctttctggaccctgacatgtagtccggcctcctgaggctaaggggctgtctcctgtagggttcccagctgaagaatgtgacatcttagggtgggaaggaactgccaagtttgtcttgtccaagccctgaggtgacactggaattccgcttattgaaaactgattagtagccccttgtggccatgtttggaaagctacctagtgaagagtccttccccagtctggtgtcctctaggggtgtccagcatagcgtagcccacttgcgttccagctccaccagttcccttcatgttgaaacctcctccatcccttgtaggggagatggggatggagtctaatcgctctctcttcatccgtgtactgttccctcgtcaacccagaaagaacccactgttcagccacagcagcctgagtgggcttttctagtgaccccactctgtatggccgctcgagatctaaagggcattagctggtataggccacctgttaactactcgggccagctttaccctggcccaggactggagttctcagctctggcagcatatttgaatcaccaaggagcttttaaaattcccaacatggaggtctggcgcagtggctcatgcctgtaatcccagcactttgggaggccgagataggcagatcacctgaggtcaggagttggagaccagtctggccaacatggtgaaacctcatctctactgaaaatacaaaaaattcggcaggcatggtggcgggcgcctgttatcccagctactcaggaggctgaggcagaagaattgctgatatcctgtaggcagaggttgcagtgagccaagatcatgccactgcactccagcctgggtgacagagggagactctatctcaaaaaaaaaaaaaaaacaacaaaataaaattcccaacatgcagatacgccccagatccattaagtaagaatccctggggtgggacctgggcttcagagattttgttaaagatccccaggtggttttagtgttcaggctagtatgagagctggcctccccttttcattgggctgacatttgtcatttgggaaaagccatcctcagggttctttaaatttgtaagatattttggcaacttgcactgtccccccggggctgccagtcacatcctcccctgaagcagccccccatgcccagtggtgtgtggtgggaggggaggtgtcgcaggcgcactgagggtgcatgaagcctggtgtgctgtttgctctttccttcctccctccctcgcatgttgtgctgccctctccctttacaaatgctgtctcctcttcccttttgttcttttaaacagaatattcatggtttgaagttcatagtccataggttgtcagtttcaaagatatcagttgaagagatgtacacttcgaaattcagttcggttgctgactttcacaaactctaaggaagggggccgtggatggcgtatcagacttgaagcagaatagggagaggcccgcaggagggtcttaggccagactgtggccaggagtgtcttccctgaccaacaggccccttactgtcttgcaggtctgatacataagttgtgcacatttcagaaggataactgtagagccgtctctctcgtgcacactgcctggtcccctgaacacaggcaagcagaggtgcacatgcgggcacacttagcatgcacactcacaccccacactccagccagagagggaagagtggaaccttcctgtgcacagccttagtgagaatgatgtggaaaatgatgagaactttaaaaaattagttccttcatttgttaaggtcttaagttgaaaaacattgtctgtccctttaaggagctgatatttcttttgagacgaactaatagaagagggaaataaaaatagcaatcctgggtttttgataaacctgtggcagagttcccattctgagcatcccaggagaagcaaggaccccttttaaactctgtcagaacctgttcctcttgggttcattgtcacattactgaatttcagtttttctgtgatatgctgaaaccccttattttctgtgaactttgtagaatttccctttggtctcaggaggtagcccttgatgctagagaggcttcagaactgagctctacctttccccagatccccagggaggaggccctcgagaagtgagcacatccagacgtgcacacatgtcccttaactttgcagacacactgtacagaaagcgtccttgaagcccctaaccggaagagcctcatttctctctgtcggctcctggtgacaccactgaggggaaaagagaggctggcacatgctggctctggttccgctgactgttgctgtttaatgtaaagatgcctcctggtgctggctggagtttgcttccaactcctctgtgttctctcagacactttctgaacactcaggtagtgctaggcaccatgctgggcacggagtggagtgaggcaaggcccctgccctccctggggtgggggttggggggcaggtaagcaccagtcattacagattctgcatcctggggccgagggacaggagcacagccagaccctggaggaggtggagctgctgaaccacaggggagctggtcctccactgtttcttccaaagactcatacggacctgcactccctcttatgtgaaagctgtctgagctgtggggcaggcagcgagggtttctgtagggaagcctgcctctctcctcctcgccctgactcagtctgtccagcttttcagcagccctgcctaagaggctgttgtcagacatacaccacccaggcgtttagtctcataggaacagagtgtggtccaagggggtttgtggcccgcaggcaggcaccactgcttgcccctctgctagagacattctgttcctcggggctaggaggcctgctgcagagcggttagttcctgagacccacagccctgactaagccaagagaactagcctcctcgcgagaagcgggggcacactctgcatctgttgaggtcttgcagcactgcctttactggatgcctgtcagcctgggcacagcatgtccccagatgtgaattagaaagtggtactgtgtccatgcccatgtccatggctgcctgccctcaagtccacctccaaggagagccactggtattttctcagggagggagcaggtgtggtgtctaaagatgggaaccacacatttttttaaagggggaaatgctctctggaaccattgactccttcctggttcattaatccattttcaatctttgatttcttaaagccaactgaaagtgaaaatgtccctgtcccaactgctacacctggggtaagatcagtgactagtccccaggggctgggccttttccttaagtttatttgaccatgtcgagttttccactggtttttctgtattctccatgattgtccttccagaacagtgtctgcagtggtttgcattcatcatcagtgtccagtactcttgaccagcccagcgttctcctctaacacagtagaatacgtggacatgcatgtgctgtgtggacgcagttttccgagctctgtgttgttagcatgtaactcttcctttcatatcatgctttttaagatgaaaaggccctagaatcacatcttcagttcttacctctgtcacctttgcatctgttgctgtttttctgaaagtgttgcatgttctactttccattgggtttgacctctccatgataacccttcagaactctgaagagagcaatagaatctccatcacctttttccgtcttttccgagtgatgcgattggtgaagcttctcagcaggggggaaggcatccggacattgctgtggacttttattaagtcctttcaggtaagagccatgccaaggacttctctctttgtctttgaagatcatatgtaagtcagtgattgtccccatcctagaggacccaggctccccctgtgtggccactctgtggacctaaatcaatagaaaacatggaatgctggagagacccaaatcagcatttcttgggtcaatcacatgggattacttgcctaaaggaaacagaagagaaagcaggaaggatccgtagctgagagatctgtagcatttccaagactgagagaggtgtggggcctgcagccctgcagtgcccccgggatgcctggtggtggtggtgagtgccaggtcccagcagactgcctggaagcccaacagcctctctctgacaccttttcctcataaggctacaacagtgctgtgtctgttggctagtctagatacaaatcagaaaccaccacctgggccagtgcactatcactgggttatcctgcacctggaagggtcacagagttcgggatgtttgggcatacaccatgtctcatttgtcacctctgattctccaggctggcacagctcggttctagactttcccaagtagaaccagcttttcccgtacctgccagtaccctgccccagacattctagccttctggactgattccatttggaagagaaggtgtgggaaatatagattcttagtaaaaggtggacccatgtagggaatttgtggatatctacaagcattagaaagtgaatcctgcatcttcattttttaaattatttgactatttttcattcaaaagttataaatgtttacaataacaaatgaagctgtccaaaggtatataaagagaaatttcaaacttggccctcacccacccctggggtaaccagtgttaccctcccagtaagcatttgtccctagtagatgggattttcacaggtaaaagggagaagggacagcaagcggggtggtgcaggcactcacaagggaagtcacagatcctgctggggagaatgaggttggaggaaggtaaagtgggggcctcaggcaggtgagccttgaacttgctaaggcacagaatcctcgacagttattattcatttaaagtaccaaaacttgggaacaaactgctataaaaatagataattcagaggtaatgttatctcactttttaaagaaattcttaaagattcaatttgccacagataagaaagtcatgttccagagcagcagttcataaaagcagagaaactgtgcaaacaaaaatcgtaaacatttggcaatctaggaagaaaatgcacgtaggtatgttgaggaaagcctgaaacgaactctgtgggaccctgctgagcagtccagctgcagggagggccaggctggcaggcacaggtcaacagctggcacaggtctgaaggtggctgagcacctgtgagccactgactttctgacaagctctctcggatagtagagaaagcgggtgctttaagcatgtgttcccagaattaagcctaacactctgggcaccctgtgcaggtagacgtgttggtcacatgtgatgaggtaagacagcagttgacattcagtgaaaggacgggggatctgtcagacactcgtacttgtatttggtgtttatgaagggagccacacttggcgaccccccagctcactccttttcttccctggcccagccccccaacttagcagttctttcagaaggtgtacatcttaagagaggtattttgcatcctacagccacagccagaaagtggttcttcccctctgacccagtaattccactcctaagacttcaccttaaggaaatacttcagcagaagcaaggtggttttgcataaagatattcctttgcgacattatctacaataccgccccccaaaacatacccacaaaagaaagtggaagtactctaaatgtccagtgttctggaatggtttgatcaattataatttcaccccaaaaatccagtaatgaatttaaggattatgagagttacgtgtctgtgttgaaaatgtttagggttaggctacagggttaatgaccgtggaaagcacatcctgcctgtaatattgtaacactgggcgtgcatgtggatggtgtcttcaggactaaagtagttgggcagggctgggatttaaacggttcttcctcactgtcgatattctttcacggtaacacgtggaatagaaaggaagcatgtggccactcatgggtcttctcaggctgtggcgggccgtcacggggacagccggctggtgctgagccaagtgccttttctctcccaggcgctcccgtatgtggccctcctcatagccatgctgttcttcatctatgcggtcattggcatgcaggtaagctccagccatctcgccctcaggggccctttcactgggtagccccaaatctgtggcaagatgtaccctgaccaagtgaagtagaagcattgtgatttttcagccaaatgcctctgctgaagcctaggaagatgagaaagacaaagctgcttagtagagagctccaggggaggcccaggctcagatgaatgtggagaggttagaatgcaccaggaaaaactgcatgtcatggcagaagaattatgctttatcataacaaagtgaaattcacttgaaactaactatttccagatgccaagactgaagagagaagcaagtagcccctcgtgggtcttttcagtctgtgccgagccgtcgcgggaacagaaggctggtgctgagccaagtgccttttgtgaccattgttgtgctttagtagctcacctttaaaaagaggcatgaaactgggctcttctgtgacccaagcagaggggctgcaccctgtttcccagttcctcctgggcatgggaaagggactgggcctgcctaacagaggagccctaacatcaagtgggcagtgggatgggttgtgggtggagggaggcagcctagtctaagaatggaggcagtcgaagagcccaggtggctgtagatctctgctggcaggctccttgcagattctccacgtgtgcaggtgctgtctttcaggtaaaggagggatgtaagtcagaaagaagtaaagtgattctatgatttttggggcagagaaatggtagtgcttttttcttttttcttttttttttttaaaatcctgaaagcatagaagcatttgcagatctctgggaatcttaccaggagttatgaaacaaaagtcagcatacttgagcctctgtgattcagcagcacgtggtgctatgtgccctggaaggtcttttatcacatatgttctcataaaaaaaagccatctcagaactgcaagctgcatggcacacacaaccccagattcacccagcaggcgtttgtaagcatctgcaggtttctctagaatgtcagtctgctccctaaatctcacaagtaaaactctttagtaccttcccattgccctgaagataaagcccactcttctgcccggggctcacagcccctgcctgttgcctcctgcccttgtctccagcctggtcttttatctgtctgctcatcacacgttattttcattccctcggtatctatgctgtcaccctgctcctatgcacatggtgctccctccacccgaaacactcttcgcctttcctatcacctgatgtatctttcagttctgagtttacatgtcacttccccctagaggccttccctgacccagccccccagccttcagtagatgagcctgtctcacgcttccctgtgtgtctggaccaccccagcatcatcactggggtttgatgttgcctggctacctttgtgtctcccccaggggagatccgcgaatgtgagaccgtgcccctctggagcaccacgttcccagtgtgtaacctgctgcctggcacatggttgtgcctggcagatcttttttgaatgagtgaagtgccaggtaccatgagaaaaccctagctggtaaagatcaaacctgagttagttctaaattcacatacggattttttttgcatgacgaaatctattctctttttcctgacaacttctccacctagatgtttgggaaagttgccatgagagataacaaccagatcaataggaacaataacttccagacgtttccccaggcggtgctgctgctcttcaggtgactgcaactggcttgggcggtgctcctgggcaggggggtccgctaggcgtgggtccagagggacggaggacacaggttattaaagcagtgtgcctttctcagttgattgtgatggctttttgtttttgtttgttctgtattcttaaacacagaccctagcatttcaaacacaggaattttgctggattgttaaaactgctgtggtaatcccgattgtggctggcataaggtttattcatttgggagttagtagggctacttaggccacctgaaaaattgtaggatgtacgtttatgcatggaggcatgcacttgaacacgaccaggaagacagaaacttagcaaaaacgtcaaggccttttgcacagccagtggggaacatcctaagatgtatgatttcaaattttttgggattgcttttaacgtcagttaattaactttgtaaaacaagctgccctcatagtgagaaaactttctagagatcatgaagtatttctaatgactctagtgactgacaagtcatttgcaagttaggtggtttccagctctgccttcaacaaaattgaacagagacttaagttgttaagtattttggtcattaaaaataatcaataggccaggtgcagtggctcacgcctgtaatcccagcactttgggaagctgaggtgggtggatcgcttgagcccaggagttcgagaccagcccaggcaacatggcaaaaccttgactctactaaaaatacaaaaattagccaggtgtggtggcaactgcctgtagtcctagctactggggaggctgagcccaggaggtcgaggctgcagtgagccaagatcacaccactgcactccagcctgggcaacagagcaaaaccttgtctcaaataataataataattaattactgttaattatacaaatgtttaaagtagagaagacacaaaaacaagcatccatttatatgcagacagttagcgcgcttgcatcagatgatggctgtaaatccaagggaattgcagcaggacctccagttactgtgataagttgcacgtgaaaatcagtaggaatttcacatttccattaattcaaattggattttcttcaaatgacttaggttttgctctaattatgagtttttctcccctaagatctaagcttcaaattccttctttcccccactaaagcccctttgttcttcatctgaaaaaggtgtgcaacaggtgaggcctggcaggagatcatgctggcctgtctcccagggaagctctgtgaccctgagtcagattacaaccccggggaggagtatacatgtgggagcaactttgccattgtctatttcatcagtttttacatgctctgtgcatttctggtaagtgagcaacacagctccccctctcaatttacagatgcttatgtagcagtcagcgttcacacaaatggccttgccctgtcccatcgcctgaggacaattgatgtggatgagcactctggactccacttggcagttgagggcttttgtttaaccaggcgtgtgtcactgccgccacctttgtaagcagagatttggtgctcactaatcggcttggagcaattaccaatcaccttagcttcttagggttcctttctaaaatttcaaagccagtgcatatggtggtgacctaagagtgtgaattatttggtgataatgaaattataaaactgcaatgtgtttcagaaggccttccttccccaggacttaattaaagccattccagaaagctagaatcacactcttttcttaaacattctccaaatagaaagtttttacaacttctcttggagacatgggttcccatgtttcatgtccatgtcattagaaagcctgtgctcagttctaacgcaatccagctgcagctgaagttcttcctttcctatttgctttttcagatcatcaatctgtttgtggctgtcatcatggataatttcgactatctgacccgggactggtctattttggggcctcaccatttagatgaattcaaaagaatatggtcagaatatgaccctgaggcaaagtaggttgaaaaatatttgatttggcgtgtgtgggtggattttggaatgtcagctttttttgtggagtggactgaaagttcgggccagctggtactgttcctggaccttagattgtattttacttccaggggaaggataaaacaccttgatgtggtcactctgcttcgacgcatccagcctcccctggggtttgggaagttatgtccacacagggtagcgtgcaaggtgagtgtcctgtgtgcgtgtctgacagcctgtcttgtagaagcttgcttcatttaacaaacacttgttaagtgacacagccaggccttctgtcagttgctagggatgcagcaatgaataatatgtggttcctacctctggggaaatctcagatttgtaactctttggacaccctctcaggaaccatcagaagaggaagggaattctgtaatttgtcattgggtggatggtagagaaggcgacatttcagtccggtccagaaggaacacaggagtttgtcagaggcagggagggctcagaaggaggcaggagaatggacatcgtaatggcaaagggtgagccattgggtcatcctttggctaggacataagaggaagtcagaaggccccaggtacaagctgagccttctctgtcctgctgaggtccaggagaatggggaggaaacgtgaatttcaggttcccatgttaggaagttggctgttggcaatggagaagtagacctgaggcagggggatcaaccaggagagccagaacgaaggcagcagaagtgggaagagataggagcagtcgcttggagatccacttaggatgtggagtggggaggacttggtggcctgggtgaggggagggggagtgctaggagagcacatctcccagcctcggcattgggggacatggtgctctgtgttccacacgtcccctctgctacagagctttgtggccaccacaggaaatggggcccctttgctggcacactaggctctagtctctcagggatggatgcagatctcccagtgcaacgcagttctgtgtttccatgccagagcacgctctcaggaaccctcagtgagacttttccttccacagaactcacggtgtagcaccttacatttgttgcagcgacaaaaaagattttcctttttcaaggaaaacgcaaggtttgcctcttgaaactctgccttctagaaattcatacagtctgcatagcaactagttcttgctcctcatggatccaaggagatcctggggtcaggcgtttttaccactccaggatgctgagccagctctagacagaaaccaaggtagcagaacagagtctaaaatatgtttcagactctcaaagaaatcccttgagccagactcatgttccctgccctgaaaatccagaaagccttctaggcaaggccttagggtccttgcctctcttcaggccggactctggatattgaaacagagcttgacttttttttttccataaacttcccagtactggcctcttttctgctttccaagaacagtgtgggatcccgttcactgatgtcttcttgtgtttaaatttccagacccttttacataaagctttcaaatgtccttgaggcacagtcatccattttgctgactcaggaacttaccaggaaaagtgaacaaatgtccagggttccctggctgcctgtgctggttttgaagagggtgccggggttggtaggaggactaggaatttgggtgggatggacttatgcagacacaagattccaaatcatcaatatggaagagaaagaaaatcttttcttttggaacatgctgttaatgaaaaataagaagtttttaaatattatcaacatcaccattaatttagtgcttgccatttgcctcacacaaaactctttgtgtccgtgagtcctttaatccttgcaagttcccatccattgggcatgtcatctgcatttacaggttgaagtgactggggtccagagagggtgtacctcacccaaaccccctccaactctcattgctggtgttaaagggatcaggatatagaagaggagtggggagcatggatcctgctctgaaagaccaaagcctgggagaagccacataggctcatgcaaaatgccacaagatgtacatgatggtctaactaggcaaggtctgaaggacattccctgagttgggaatagtaatggatcccgtcggttgagaacctaagtcccaggccctgtgcctggcccattgtcttttacttcctttaaccctcacaacagctttaaaaacatgcttggagccgggcacggtggctcacacctgtaatcccaacattttgggaggccaaagcaggaggatcccttgaggccagaagttcaagaccaacctgggcaacaaagcgagacctcatctctaaaaaaacataacaaaacaaaaacaatgtgcctggaatggaggtctgaccctaagatctccattgagattagtgaaaaaaaggagaagactgtttgaacagtgaagtttcacggtttaaaaaacaaaacatcatctgcgtgttaacatttatatttcatgactaaacctttgatctttgtcatcccagagtcccctaagtggtaggttgtattaatcagggttctccagagaaacagagccaataggatggatatggaggtgtatatgtatgtatgtgtgtgtgtgtgtgtgtatttgtgtgtatatatgtgtatatgtatatacacacacacagaggtttatcatggggaattggctcacgtgatcatggaggctgggaagccccatggtctgccatctgcaagctggacctggtgttggtgtccactctgagtaaagtcctgagaaccaggggagcccatggtgtaagcctcagtcaaagggcaggagacaattgatgtcccagcttaatcaggcctatagagagagaattaaatcttcccccacctttttgttctctgtgggccctcatcaacagaatgaggcccacccacattggggagggcattgctttactcactctacccactctaccaattcacatgctaatctcatctggaaaaaccctcgcagacacacccagaaatcatgtttaaccaaattggcatctcgtggcccagtcaacttgacacctaaattaaccatcatatgcgtacccccaaatggctgttgaatggaattgagggttgactagaaaagagatgagtgataaacggaaaataaacatccaaaaggatatggtcgtggtcactcatttgcattctacaaagaaaccttcctttctgtttacagagattagttgccatgaacatgcctctcaacagtgacgggacagtcatgtttaatgcaaccctgtttgctttggttcgaacggctcttaagatcaagaccgaaggtgagcattccctgccagcaagacaagatggcaggaaaggagagagacatcacatcccatcttgccttcctcatctgggccttttcttggccaaggggaggccctggggaaggggctggcaagtagaatgaagatgtccatgctgggcttgccggctggcccctgcctcctgtttcctcatcctttatctccttcctttatgcttcactttgtcccagaatgttttgagttgactcatactactgcttactacatagcaagggaaacaggcagggtatcggagcagagacgaagccatcacaaatgaactcactccaaccatccctaactagttgtatgacctgcagtgagggatttcactggtctgagctgtagtttctttccctatgaaaaggaaatacggggatgtctaggaggtcctgaggatgaaatgaggtgatgtctgcaaaagctcctttgcagtgcctagcacacagtcagcacttgagaaatatagtgggatcagcatcttcccagctgagagaccaaaccagaatggccttcacagccatgctcagccctggtcaaatcctggtaaaacaggcactagagtgtggccattggagctggctcagtggtgacttcagaggtggaatggagagcagattgcaacaggctgaggagtgaccaggaggtggggggaggtgggaggtggagacctcaaggagagctgactctctgaggcactggtggaggagagggaagaggaggcagcaagggactcatgctgagtgcaggcaggtgacttcttacaaccctagagcccagggagacttgatccagcaaagccagcctcttccagcctaactaacaggggcgccttgtagcatgcttgtctgtacctggccccaggccagcattgttaagggctccagaaggcagaatggtcctctatactgacatgttagttgaaaagacaagtgtcagctcatataataaaaggccaaggttatgttgtatggatgagtacatatagtaggaattgagagtcttatttgggtgaaatttaggctggatcttcaaggaaggaggtacgatttggaacaacccatgaaagagcagaaggcaaagacattctgggttgggaacaatggaaagcaagtagtaggtctcagctgtgggagggcaggatggaatcagagtgggacaggccttgaatcccagggtgaaccgtgtttgttcccatggtggagggacttcccactgggaaggcatgatcgctattgctgaatataggaagtgtgtttgcccctgactggggagagcctggtgggagtggagccccatcagagggcagcatgttcatccaggtcaggctgggacaaggctgtgcaagcagaggaggagctggggaacagaaatgaggcttgcttttccccttttgttttttgaatccagggaacctggagcaagctaatgaagaacttcgggctgtgataaagaaaatttggaagaaaaccagcatgaaattacttgaccaagttgtccctccagctggtggtcagtgcagtctatttcctaagtagtccttggccagtgctttggttttaatgctagtgtctccagaaagtccagagagtgtttgcaaaatgctttatgtatcatttagagcattaaggccaactgataaagaaagccctttggccatttggtgtgattattttgggggtgatatgaagaacattccagacaaaggagaggcttcagtgaaaaaccaaaactcacatggctggagcagggattttctttttggtggaggaattaatgtttgaggacaagattgtgatctcaaagtgaaaagcctatattttttgtccaaaatgaaatattcaaaactagtttccaattacccttcagtatattgttgaaaatgtcccatgaaaaatagacagctttcaggaaattgtatttttgaaatgttcttatcaagactgaatttactaccgtaattaccaaaaatgtccttttaactaacaggcatgcttatttccttttgttatttatcacaaaataactaaccttctttaaatttttatatatataaaaaacatctatatatatacacacatacagtgtgtgtgtgtgtgtgtgtgtgtgtatatatatatatatatatatatatatatgcatactggctttgcatttttatttaagtacatgtggacttagacgttgagatggttgtttttgactgttctgtttccaagttttaaaggtgcaggatctgttcacccagtgccaccacaccagcattctagcatccttgggccgggcacgtgatgagcctttggtgtgtttcgtgaccagcgaacttttatagcgtcgctgccgccacggctttcgagactggtctggctcaggtctggtagctgacttcaggacccaggccaggacggtgaccgaggccctgcccctgagaaggtgatgagctctggctcttggggcgcagacagagcagcatgccagccagctctgctccttagcatgaagcgagaagcaacgtgagcttttgttgctgaaggggttacccgtagctggcacagccacaggctcaaagctggggaagatggcccagaaagaaatgataaaaggaagacaaaccaacaacaacaacaaaacaaaacaaaagtcctcccacctggagggccctggcttcccacaggagaaccgatactgcacatttaaaacaactccttggttttcattcttttctttttagctgcacacctaagagcttgcatggcttacatgaaatgctttggaaaaattgtaacaatgtgcttgagcttttcctgcagcctccattcctttcacctctcagtctttcagaatattctgaagcaattctgttttagggtggtggcatggaatcagagttatctcttgccaactgtattcccctacgttgtttctttaaatacagatgcatgcttcagaatagtgggctatgtctgtctatgtaaaccttccccctgcgagctgaggaccccgctcctccctcgctccacctcacatctctcttggaacgccaccttcatcacaaccagccagactcccacattgatgcccatcctcgtgaaatgccctcggagggtgtcatttgcattagtgtgaaacttcatttcttttcattttaccaaaagaaaagtccagaatttagctcgccatcgaagctcccttcctttgaaaagctgatcaacttttagctttatcagacttctagtagagtagaaatcttcttctttcttggtccaataactggacctcgccttttctctctatttcttaaaatggattggagtttaggatgacaggttttaatctattccacaacggcagcgagaggcagtgtgaggcacaagaagagagaagtggggccttaggagggatgcaaggctttgcaagctccctgcctgtgttgagtgatgtgcccagtgcagggcttatccgggctgaatctcatgtgagtgctgtggccacgaaggaagttccgaaggcagtggccatcaggctttggtgcatagactctggaagagttgccggacagggcttggttctccacattcatcatttgtctgtctttcctcttttatccttcagtaggcccatgtccccaacctttcctgcatcacagcatacttagaaaaggatatttgcatacccctctgggaacagatgtggagttcttgaggctgagggcctcagcatcccctacaccatcacctggtcaagaagcaggagactgagtaaggccagcctccactccaagtggctgggactggcagatgtggggtgctcaggaagccccttttagccctggtgatagaactgagtcagatgcttgtcttgggtggcttcgctagtgtgctgtgaggtgtggcctggctcctcatgagcctgatgatgagatcaggaatgagctgtggatctgtggatacatgtcaggcttgcttcactcccagtggcccgggggtctccgctgccccctcaccatcagtgctgagccgcctcatctctgcctctcagctcaggttctcacctctgctcttcagccttcccgtgccatcttgtgggtcctttcccttcatttcagaagctctctctcctccccaggactctcctccatccatgacctggatcctttgctcctttgccctgaagagcacactgagctgcctccattgccttcttttcagtccggagcccagatggcctccttgtattcattccttctcttccttcctgttctgtcctgctgtagctttgacttttcttgttcttaggaactcttccttgggcccagtctcctaattagcacagtgtctcaatggagaagacgaagtgacccttgagttctctcctgcagagctctgggtgggtctgcctctactctggaggctgaagggagatcagagttaggcctgtatttgctagaagcatcagggtggaatggggtgtgggtcttcttcaggtagagccagggcgttttctgggccccacagagaagacacagagccctggaatatagaggaaggctgtggcatggcaggccaccagagactctccctggggtccctggagtcattagccagacaacagcgtgtccactttttgtgtgcagcctgggaaagggatacacttgcatggtgtgagaggcagctctgaagaagcccagcagccagtgtggctggagacggccatctctggagaggtggtatgaaggataggatcccagactcaaggagcacactgtcctgtggtaaggtcccggcttgactgagctgggcaagtcatttagccctctccatctgttggagggggtggtggtgagcagatccaccatgtcagagttgtgaagaggccatgagacccacatggaattcttctgacacagggcttggcatctatagatgtccaacagtaggggctggctagagccagagctgatattccaaacataccctgagcaaatggggaggctggagagtacagcgaggggtgaaataccaggacctgagtggtctctgctcacctcctgccttcttgcctatggaccttgcatcattagacaagccgagacagattaggaaccatgttttacatgctactcagagtctttggcttatacctgggtggcccctacaccactccaggactatcttagcttaggtttagaaggaacagaacacttctccaggccagaccacctgagacagccttctcacacagtaacactgagtggcttctgacagggaggcctggagaggcagcccaaggaggcccgggcatctccagtggggaccacaagatgttggcagcacctcctggatgggcactaagtgaagcccaccccgggtacattagtgaaggatgatggttctccatgtcccccagcccatcaagcttcaggatccatgtcaatggatgccaccgtcagcacattttaaaataagggtgactctgagggctcatgatcaacatcaagtgcccagcacttaagacagcctgagccaggtggctgagtgctttacctgcttcctcccacatcatcctcacggctcctctgagaggcttatccccactttacagatgagaatacaagctcagagaggttgagccccttgcccccacatcagcatgtagatcttgcaagggtggcctggcctaaaagccagctgctctgtagcctttggaccagcaaccattcctccttccagcctctgcaagttgtggtcagtggcccccagggccccacatggccccacacacatgggacggagtactaaagtggtcacaagctttacccccaagagacacagcacactgaagatttggtagcaagcagccgtgggagagccatggggcacatttacacgtccaaagtggtttaccatgagacagccagagcctctattctgcctcatgcatcacctttaaagtcatcagcagagttctgattccccaaccatacacgttggaggttgtttctgaacaaagcaaaaataagcccagctcaactatgaggttggttggagctgtcactacagtgcagaaaatgagctgttcagaattacaaaccaagaaatggtatatggagcttattggtggagaatagggggcggggagctcatgaaaatctgaatttgcagtcacttttctaaaccttcctctccttctgagcatgtatgtcacctttctaggtctctatcttgagacatcgggatttggacggttaattgcccttgataagtttatggtagttatacatgcaaatccctatgcacaggggtgaaatgtggcccgtgaagcctctttttgttttgtaatttttattttaagtaaataaccaagacagcatttcatagtgttactaatatgctgctctattaaactcataacaaatatattattttctgcaacctagagtatcagttcatttaactgacactaattttgagccttagttgctttgcaaaaccttgctttttgctggtttgagacccctgtgttatatgctgagacctcggtgccttctgcgccggaccgcccacccgccccactctgcccctgcccctgccccagccagaagcaagtgtttaggctcttggtctaatgtgctgattcgggagagctctgtctggtctctccgtttagatgatgaggtaaccgtggggaagttctatgccactttcctgatacaggactactttaggaaattcaagaaacggaaagaacaaggactggtgggaaagtaccctgcgaagaacaccacaattgccctacaggtgaattgttgtctcattttgttttctcttttgactaacgattttacaagcttatttgaaatactagagagctgcctattcatggttgagcagtaccacaaggattttgtttaaactgagatactacacactcccccaaatgtggactagccatttctgggccacaaggtaagtgcttccctccccgatgcctaccccatagagccctgcacctgccactacccacgcggcagggctgccaggacggagaggagcgagcgctaccctcgcaccccagcccctccaggcagcatcctccaagcaggcacccaccttccccacagccctgggctccagggttctggctgcccagtgaatgaacagctttccatctgaacgcaagtgctttgttttgtttccgtttgtttcttaccccactgcttgttggtttttggtccatttcagtaacatccatcacctcctagtatgtattctgtgtgtgtgtgtgtgtgtgtgtgtgtgtatgtatgtatgtgtggtgtgtctgtctctgtatgttgtctcctgatggccaggaggccagctgtgcacatgctatgctctcatgccccagccagcctctggtccctctccctcctccacctgggccctgctgcaggctcctagagtgtggatgtggctttcaggaacctctggtaccagccagggtccttgcatgcgaggaatgtagaaacctaggaaagcccaaagctctgggatgggaagcaggtatgtggaggggcaaggaaggcaccatgaggaccagcaggaagaggggctaggaaggtggtctgtgagtgccgtggatgaaggaggcagggcaaagagggagaagatgctaaggacagggaagagggaaccacagaggctggcaaatcatctgaaacaactgacctctgctgcccagagtgctcataatccatcatggataggataaagaattttttaaaatctatttacgccacaattttatgcccctgttctcagtacatgttaaatttggccttgtagatattgataaggttcaacatggaagagtccttcactcttatccagggaaaaatgcgcagcgttgtgtgttcaaagtgatggtaacagcccaaatgagggcttatctttgatcttgctgagagagagaatatgaatatgaatatgaatatgaatgacagtgaatgagtgaatgacaaacatgagctgtgtgtgtgtatctcgtgggttagtagatggccttgtgtaacagtgacctgctgattcatggtgcaacctctgctctacccagacagctacaggggctggggaaagaggcatatgcgggttggcaggtggaccatgaatccgactgaagacagtgatcttcctgcctctcatcacgtatcctaaaggtagctgagggaatcacaggctcagtcacacagcccattggcatctcaggtggtaggatttgcaaatgaagctttctcacttccaaccaatccagtttgtaaaagtgacagcccccctcctggattgcagttcacagctagcctccgaaagacaaagcaaactgcagagatatgtttgcagattagaagaagtctctggtccatccatccttgagggcagcgtggccaggttgggtgccaggagagggagtgatgaacatgcttctgcaggcttgtccttaaaggagtcccctgcccagaagatgaggctggttagatggtttagttccatttcccagtgccctctgcttgtagggaactgcttattgttctgggagcctaattgggaccagaacttgataacttttctggagggaggaacatagtctgtcatcgatggttgatgtcctaatttacagccagcaggttagctaggtaccatgagaatcttgcattttctgtgagaggcatggcggccacttggatgcagggtcatttatactttttctgaacccccaagacttcccaattagacaatttcagcactttctctagtggctggaaatagtgttttgatgttttaagatatgcacaaacaacacacagctaagtcattaccaggtttcacgtatggggtttactgagtcttaagttgaagggtcaaatggcatgaatgatacagcggcaggttgtgggttaaaagactctttttgtgttgcaataatgttgagggtttctcctaaacgtttttcattttattgtttatagagtttcattttattgatgaaatgcaaacatttccagttagatgataccaacatattttcgcatggctccattgggagctgaagcatcgtctgtaatttatgttgagaatgcagcctggaaaattaagttgtgttcataatcttaatagagaaactgaaaatgtacttgattctgaaacattaaacatagacattttttttgtctccttgaaggataattctaattgcattttggcttcctgtgctgtagaaatggctgtgagtgtgatttgttactccatgtttaattagcatgagtaggctttcgtttctgcgtgatgaaataccgggtgacgatgtagcagttaggaaaatttggtgggacggcagtgggagagatataccaccagtgtaactaggacaaggacacagcctcgggaagcccctgagagtgggcgtggcctgttgagatggaggatggcttgcctcctcccacagcagggtgccccatggctggcagactgcgtgctaatggaaagtggagcatggccgtcgcagtgtgagcgcagaagtgcggacctaggcatgtgcgtgcttgtgctgcgtagggtgcagtctgtctgaacagcttccaggatgggcccaagacctctgcgcccccacccccagggaatgttttttcaaggacacatatacgcactgtggttttgaaccctgtgggctccatctgatctccctgtgttcagaccaactgcaatgctgcctcccacatgaaggggaatggcttgagctcctggatccatgtgtgggaaggagctcggcatccggtgtcttctggcctctgtggtctgaatgagtgtgcagtttccatccttccatccatcttcatcattaaaaccaaccttctctccagcccctctacagagggaaccagagagaagctgcatcaggccttttttaatttcctcttgcgcatctcctacatgccatgttcactttgggttgactcagcatttgctcgtcatccattgttgctacatccgagtgacccacgagtttccacgaggggcaaataaataaaggaacacagccatgcagccatgaaaattctcagtcctcctcccagcagacagcaatgcatgctgaatgtcccatcagaccttctagatgaggacatctgtgcaagttacagacactcattagtccagtgtcttgtggataagaaaaagaccccaaagtgggaaaagttttgttcatttctctttcttttaacattcaagaatttcctttctgcaaaagacatgcactccggtggaatccgaggacactatgtcccccactcatcccagatgggagcctttccatctccattgtaggaaagctttggagggatagtccttttgcctgtttggaagtttggtttaaggaggagaccattatttctagctataaagaattaggttgttaggttgaataattgtaaagcctgtgcccgagccgccagttggcgatgcaggtggttgaggggagatgtgggtggtatataagaagcaaaggactctcagcccctgatgtgccccgcgtggtcttcttagggaggctcaatgcataaagacagaagaaaatgggatcctccacagagatttaatctgtagaagatcaaacacctgttgcctggtcaccttagtctaaaaagtagtggagttttgttttgttatttttttaaagcatgattctacctgaagccatcaaaagcctctttttaaatttttttctttttttaatctaagaggagaacagatgctaacagatgagatttcactggctgattcgtttgtttcagatgcttgaacggatgctttagaattttctgcctgagctacggcaccaagctggttagtcggaaggcgtttgtggctaaggccttgaaagggaaaagtctcaagtgggcttatttctactgaaacagcatttcagaagaaatgcaggaaaaagcagacccaaggccccagggagaccccttccaagcaaagcactcctccggaaggtggaagcggggccgtggctcatctgcggagccagggctgcctgtcgcggacgttgctcacggtggttctttttcgtgaaagggaacgtacaaagcttaacagttttcccttccaagcagagactcagagaaagggaaagagtgagagagagcaaaggaggggggcagctgccccacagagaaatgaaatgaacacaacttcctgatgctggccagtaaaacaaaaaattaaaaataaaaataaaaagattaagcagacctgcctaaggtgggtatctgactccattccaaagtcctgcatccctagtttgcccgaactcccaaagactgacaggcccctcggcgctgagctgacagagttccttttgtatgccagtccgccatgacctcctgagcgtccggccctgctctctgcagagacccagtccagaatacagtgagaagtggacaggccaggaagctcagatacacccattgaaactaacacatacacccgcatgccaaaaccaatccaggcaacacctcaggttccatcttaacgtgtccacaggaaacaccaccacacccaaacctcatctaacattgtccgtctttaattcgtgctcagagccagtctggggatgcctctttggaagcagtgtggtctagtttcaaggacactgggagtcagggaacctgggttctagtcccagtttcagcattcacttgctgcgtgaccttgggcaagacacttaacctctctgtgcctcagtttcccccatctgtaaaatggggttaataatgtcgacctacctcacagggctgttgtgaggaatagctaagtgattgtaaagcactttgaacgtataattgcttattaagactacaacaataataatatcatatgcctgtttactaccagaactttaagaaattcttgttttcctttgatctcttttctgttctgtaccatacttacccattgagaaggaaaattccccccttttaaagaaatctaggcaatgcacaaagatgtcaacagaggtaaccctgcaggttgcattttcacatcttaagaatagcagatttttgcccaagatgttggtcgataagggtgtctgatcttgaattctcagctgattccaagtggtggttggagtctgtacatctgatgctgagcccaagacacccaaagtggccagtttgggttttaagatcaacattcaaagtagccatagtgcagaggtaatgcagaagaatctaaaaaaattgaagtatctgaagtgtatagagaaaagaagggcttatgagcccctttcacctgccctgatgtgtacaggctggaagctgtgtgtgtgtgcgagtgcgtgtgtatgtatgtggggtgtgcggagacaggggaagagagagccagcaaactctggggggccctattcctgtagaagtggacacccttccaagcatcctgggagggcaggagtcccaaaggctaggcagagggtgggagcaatgtcaccagtgggaagtatgctttctgcaggcttgtcctaggtgtgactgacagggtcagtcccagcctcagggtcttttccagtggtgtcttttgtgcctatgacatttgcccttggctgcagtcctcactgtaccgagaggtctaacctacctggacttcagtggacctgctgtcctcattatggaaatgggcctagctcccgactctgcccccatgtgtataagtgtgcagactagttaacatccaggagctcacagtaggtgttgtgggttctcacagcacagtccacagggcccaagggcaggtttgactgcttcgtgctgcaccacatggtgatgtgggggatggggtagaaagccaggaacactccagtgtggccaggccacttgtcaagatgttgaagcacagctgcacctggtatcaaccgctgttaccctagcacctgagtctccttccccactgccagcagcccagcccctcctgagactgctctgtgacccagcagctacaggtctagtgcctggcattgcagggagcctccaggaccctgctgtgatccaaaggcccacttctgctctgattgggcagcacctgggtatattaagttataagaatttatgaagaatgtgatgtatcgtccctgaaagggaagcccgtcagtcctgtgggggtccgtcagtccctctgtctgtctttgacccacccgacgttgagttgattcagtgctgaaggatggcacgtgcctaccccctgtatgtgtcactctgtctcagagggccggtgtgaccgaccttctagatccaagattccatacactcaggcctcggcagaaaggccccaagcgattcaagtgggcggcgtttccatgtgccttctccacgctcctcaaataagtaaaaactgacaagtgaccactttctagatgggacttagggagtgatttaaatggaacaagagagtcttctccacttgggcctggctgtgttgctggggaatggcattggctaaggttggtagccaaggccagcttaggaaagacagccaggaatcaggaaagctgcttccagcttcaactcaaaagggaaagaaggcttcctgaaacttgatttgcagtcaaactgcagagacaccgctgtcgtttctcttaaagccttggcagagaagtgtagcttctagtgtagtcaaagttgtgagagacgactcaagttcattatttagaatcttcacagacacacacagcaaacttggcacccccaacaccagcatccataggctaaactcttcagctcctggatagaagatgagaggcaggccagtatacattgtagggaggctcttctcaaatagcttatactgtttaacaacccaattaaaaattaatccacaggactattgggtactacattctatactctttctgaaagtggggagatctcattcctttgagaataataattatgttcaggagtctttgagaagaaagactgcaaagaagttaagtgatgtgacgtagtagtaaaaggtggtaattatcgtggcttgttatttagtaccattcacctagtgtcctttggcagcccaattgtgtcatgattagatgatctgtgcgaaggagctggctaagacttactaacagttctagggtgggtagaaacccaggtgagttcattctccttggcacctcttagacctaagggacacagctgtttgagatcttggaagggcacataattctaaggcatggtgaaggcaacccattcagacgtcccaaaggctggctcagggaagccataggaaggccatttcttccaagagtggagaaaggtccacagaagagtgggaatcctagatggggtaaaaaagtctacacctgaggaaaaagtagtagtgcctgttggaggatagattgatcagcagttatcaaactttttggtcttcggacccttttatactctacattattgaagacccttgtgtgtcaatatttactgtcttagaaattaaaacggagcagtttttaaaacaagaacatgcaagcacaaagacgccagggtgatgacatcatgcatcaggcagcctttgaaaacctcactgtgctctcatgagaggatgagagtgttgaaggcaaagaacatccttatgttatgcaaatcacagtgacctcatggacccctgacagtgtcttgggatgccccaaggtccccagaacacacctgagaactgctttgggggaatgctactaggtccccctaaaggcagagggtgctggagccttttaatcatctcccttgttaaagaggctcctgtgcagtggcactgccctaactggagcccttctccccctccagccccttcccagtctcagcccactccccggaggcatggagctgcctgtgtccccattcgtctagcatggccgagtcttgcggcctgtgctgatctgcaggtgtgatggtctgaatcagggcaggatagaaagtgtttttaaaaatcagctcccctaagtgcacaactgggaccaaggatgtgtgccaaacaggatccgtttcagggataacttttgatcatttgtcatctccatgctgacttaggaatataagagctctgctagggtagtcaaaagagggttagccttgatcaggtggcaccccacagtcgtgactataggtgagtaagtgtgtgattcagactccaatccagcgttctttcccagtaggtgcagtgactttgcctgggtggtggttgaggtggggagtttgggagaggtaaggcagcccagtgtcacaggaagaacaggcttaggggccaagagtcctcactgagcctttgactcatttgggcacataatttaaccacatgggaataactttggctctcccttcctcccagaatctagtggaatatttgtatgtaagctcacaatgactggtataaagatgctatcagaacagaagttgtgttttacagcttctgctaagcctaaactttacagaatgctctattatcaggaaactggcaagactttttttgattcggttgttaaaattacaacgaatcagattcctgattgcaccaagaatcaaggtggaactgaaacggagagctctcagattgtgtgcaggcaaaggtcatattttagataatttctttaaagtttcctttatctttccaagtgatgggaatagcgcaacccctaggggagcttgtgggggtcatgttacccctgacttttcagtgagggttggaatcactgtggatgactaacagagcgccaggatcccaaccctttatatctgacacaaggaccattcacaatggacacaaaggctgccatcacattatccctggaggagagtggtgacaaaataaggggtgtgcccacgtgtgatgtgctgaggaggcggacggcagcttgcagatgagcaggtttattccataagaacttaatctcattctgttttctaatggaactagtctaaaaaggtcccctctcattgggtatagactgaatcctgctaaagggttaaccagaacttgtcaccagcgagacgactgtgtgcagggccagcctaggctgagtgcagcctgcctgtgatggggaacaggctctgccaggcagggttctttggctggagtctcaaagcctggcgcttgtatcctgaagatgaatggcctggcccagtcccgactagagacatgcatctcttatctccactgctacagcgtaggtccagggcggggctctgggcacttgtgcatgcttgctgtggcgctgtgagggctggcagatggctggtgtgtctgatggagctagcttagggacacaggcagcaaaagcattgcaaatgcatctaggcaggagaaacttaaccctaaaagtgggcaggagaaagaaaggtaaatgggtgttcatatttgatgtcaaaatgtcatcatattatgctattcagaagtgttttgagacattttagttttttttggtaacttaatcattcaatagaatatctatgaaattccaactaaatggtgtctaaaattttaagcagcagtctacaggcaaagcgccaacatttcttttctaaaaattatttatgataacatctagcattttaaaatcaaccagaaactaggcttgattctgtttaatattttataagattggacatcttaaaataagtcaataatgtttatattttatagcaactctgtgtttcttcaaaaccatatttctgctgtgatgttaatggaatgactttatatggctttaattgtgttggtttaagtgctaatgaccacttttcaaattaaaatagtattttgctgatagaggtagacacagatatgagatatgaaagaatagataattttactgtttgtaaagtgtttatcccaagaaaaaaaatgttcttttttttagggctgtggaaaagtaattttttcaagagtctaagatagttttctgtatttctggggattggaacttgtgcctatggaattttgggagcagcctaagctaccttttagcttgatatgtgtgctagaaaaacttcattaccatgttttgtgatatgtaataaattcagggtgctgtgcttaagcttcatgtcaattctagtttgggaacatctgtttccctcactcccagtcgtgggggacagcctgacctggccctacccagaacacatgtgaaaaagtagagtcagtccctgactcttatgaggtctgttttttcctgcctggaacaagcagaatataatcatgatttctgactctctgcttctgtgtctgggaagagcgattcttctctcctcctctaatgtctctttaataaatatgttgtcattatttgtctttggaagtggcaacttgggccacctttcaaccttctccatgatttatgttgcaaacaaattctctgtcccatgtctgttcattgcactatcttgtcgactaaatcctaatcttgtgtatcactgaagatgtgctggagacagtttttgtttctattatgcaattatgttatatgtgtatttcagtgaaatgtcaacccgtcaacagaggatgatgttaaaaattatccaaataaatagttttctatttcttttaatcagacctagtccaatcagttgaatgacagtaaataggattatatgttgtttaaacttgggagcatttctggcctttactgccttgtaatatggattaatgtaccaaatttacttgggggtgttgacttaagtgcattataacctatgtttattttgtggaagcagcagcaggtgtcttaaaccttgtctttttgtttgggagccttagatatgtaaccgagttttcttcccagttgatccaaaatcagaagtgaaccccttgcttagctcaccatcccttgatgatgtaccctaggaagctctgaatgaatgaaatgcggctgtttagtactgccgggtatgacctttcttcacgttcctgcagctgtgctgtgtaagagcttttaccaacatagcattacagttgccttcttgatgtttccatgagaatggcaggtgggtccacctcagaaccaaatgacttcccaggctcagatgtgctgaactcgtggatcctgagagagggaaagtgtgtgtatgtgtgcgtgtgtgtgtgtgtgtgtgcgtgtgtgtgcgtgtgtgtgtgcacgtgcacgcacgtgtatgcacaagcatacccacatgtgcatatgtgtacacacatgcatcctgagcctgtgatcagagggacaggagagcaagaagcagcctccctgaccaccccaagaactgtcttggtttgacccgggacatgactgtctgtcccctataagatctcagcattcctagtcaggaagcttaaagctttcattcccagctcttccttcaccttcagaattcactaaatggaaagatctgctgctctatcttcacagaatggttcaaaccaaacccaacctggcaccatttttagcagaattgtctcaaaggcttggtgcttttgtgcaccaggctatttttataagggcctcttgggaagttcctgtgtgactttacattctaaattatcatcaccagcactggcattggcaactgcaggagaccagttttgagcatccccagaccagtgggacccagccctgatggatctggccagactgcagccaccatcccctcctcctccctgaaccacttctgggcatctgttctaccccatgcttgtctcagggatggtcatcatgcctatctgtccttgccacagctgcccacatgctaagaggtgttgtggaggaaggacagggaagcggtctcctctccgaggacccaccacttagtccagttttcctttgcaaaccaccctgaggttgaagcatttgctgcacatccattgtcttagctgttctccaggcctttagggctacagagctgtggacagactgccagtgagtgaggaggggctgcctggatacaggaccgtagacccagggcagagaggacatgccttcttcagatgcaggactttctgtggaaaagaataaagttgccatacagtccctattagtctttaactcagcatactgttttccttcaaactggtggtcaaaacatcatcattctctcagagctggagcagtaccttcctccatgcaccatgcataagcatcttggaatgcttccctaatgaagtcatgaacaatggaagggcttatcctgggccctgtctcaacatagcagggaccacagtgaggaaggcagctgtgagggcgccaggggagatgcagagtatctgtgacgggcccagagggatctaccaggggtgtcttctggtgggtcttgcactgcctgcaaaggctgataagccactttcagtttgttgtgatcttcaaaaagcggaccccctgttggtgagttctcagcctgcacacaggctacaggccagggtatcctgatgaccacggtggccgggtcggtgtgcgtgtcagtctgctccgtcgtggtccgagtgtgctggtggttgcagtgtgttgtgtcactcactcgttccatggctttttagcagaaccagtggcctgaggactgcttggtctgcttgtgcctctggcacctacacctaggcttcctcatcctagatgcagcaagggagtccacatcagcctccctttagatcggccaggctgtgctccttgccctgctctgggcttggagagatagggctcttgtaggcgagcctactgaagactgtcactgagacaggggcataagctcttggcctggcagatcctagcactagtaaccaggcagtgttccttggaagtgggggttttgcaaaggaggttacggggttgcaggcctcaggcatcctacctaggaccttcttgaccctctggatgcctgaccataccaacaacccttagactgccttcagtgacatcagtcagtgccctggattggcttttggggaagccttcctccccaccgctgaatcaggaaggagcaaagccaggacccaggctggccccagggcccatgtgtggtctaacctgttctgccattttcattgatctaggcgggattaaggacactgcatgacattgggccagaaatccggcgtgctatatcgtgtgatttgcaagatgacgagcctgaggaaacaaaacgagaagaagaagatgatgtgttcaaagtaattattccacgcctagctacacactggccatctggaaatagcagggcaggactccagtttgggcagttaatcatccacagaagagtctggagaatgcagcccatccccagggcctagaggggctttcagaccacaccctccccctcttacagaccctccccaggcatcagcacctcttctagggccaggccagctctttccctgagcttacccagcttcccctcactgcctgcttctgaggagctcggccacagccgctggccctgtggatgagcatcctgagtccttccggcagctgcctttgctaccctcctccttcccgggccagctctttgatctgccagctggctgtcagtcccccagcccagagagcatgcccaaccttggggccaccagccagcccagctgggtataagtcaccccaacttggagcaactggaagagcacactcgagtgacagccgacagcttgctccccagctcaggaaatcggtaaccttcctcatctcggggggaccaactgccacacagtcacattcaccctgatcattgagacactcagattgttttacagggatcctacggagcttgcctagaatttgtttttcatgtagaaaaagttacctaacatagctagtctgcatcaaatacttgttaaattacctggtgttgtctcccattattttgcagagaaatggtgccctgcttggaaaccatgtcaatcatgttaatagtgataggagagattcccttcagcagaccaataccacccaccgtcccctgcatgtccaaaggccttcaattccacctgcaagtgatactgagaaaccgctgtttcctccagcaggaaattcggtgtgtcataaccatcataaccataattccataggaaagcaagttcccacctcaacaaatgccaatctcaataatgccaatatgtccaaagctgcccatggaaagcggcccagcattgggaaccttgagcatgtgtctgaaaatgggcatcattcttcccacaagcatgaccgggagcctcagagaaggtccagtgtgaaaaggtaaccttgacaatgtgtttggacttgctcatgtggtgtctgcccgtgttgcgtctagtcccaaggagcaaggcgggtctgtgctctgtgctctggggcatggaggaggttccccgtaggcatttgtgtcaggatctgtgagtgccccccaggtcactgctgcctctgacactctccacgtgatggacctaaaggataagggccacgtgccatcctacatcctgtgtggggtgccgagggaccttaaaacagcagcagccacaaaatccacctctcaattgtgctcacatactgtgcgacaggggttggtgaattgtttctctaaagggtcagtgagtcaatattttaggctttgagaaccatacagtcttgcaccttctcagctctgccgttgcagtgtgaaatatgtaagtgaatgggtgtgtggctgtgcccattaaaatttccctatggtcactgaaatttgaacttcatatatttgcatatgatgagatattttttgtcttcagattcttttttatgtttttcaatcctttataacaataaaacccgttcatagcccatgggtcatacaaggccaggtggcagcccctatgtggatggcgaatcataatttgctaacccctactctaggaggtagcctgatgtttgcattgtaaatttggttggaaattaacttttatcttctccctccttcccatgttatgcctttcctggatagaacccgctattatgaaacttacattaggtatgtgctcattacctgtttttgtgttaaatactgtgatggtatgttaccagctggcctctctgagtgctgaagaatgagaaacacttctttgagccagcctattaaaggttatcataattcatggctgtggactcagaggtcagaggttgttgcttctaagcaaaggcaccttcagatccatatctctgtcgactctgttgccatccaaggactggtgtccacacacaaggtgcaccccatgggctggctcctgcaggcctcgcgatggcactaggagcatccattgtgcatttacaggggcctcagcctgtgtggctggcagctccggctgctctctggggtcaagcttcttgtgggtgctttgcagcatgacccaaacctcctgaaggtcaggaatgggatcttgtcattttccctgtagccctcaagatatgtgtagtatattccactccacatgtattgacctgagttgaattgtgggcggaatgcccattttgttgggggccaagggaggatgggtcttcctgtgtcatgttatgaagtgaagtcgggagccatgtgggcccaagttgggtgcaagaaagtggagaagtcagaggaagtgccatccttcctttggagagaggattgacatcaccacgtccttctctgaggactgaggccaggatgagccgggtttcagggagacttaccacattcctggggcagggcagcctttggaaacatggtggacatgttctgtgacagtttcccctgtggcactgtatccagaactcactcgaccttcctgatttgatacagcaggaggtcagtggccaggaagctcctttgttccaggttctgaagtcacactgggctggagctgggggactagaaggagagggagggatcagagcagatgccctgggaacccagggtctttttccctaggtccatttttttgttctgttctccaaattgcacctattcctttggctccaaggcctctggacacaatggtttgacaccaacattgtgcagggcactgagagagaccctatcctggcccgcaggcacaccacacacacagacacacacacggtgctgttgccagaagccggaacagtccagtgctgcctgaggcaggtgcgcgctgggagaagccaggagcacccgggcagggttgccggccacaggcagaggtgcagctgcagcaggaattatctgccgcctgcccaggttctcagatcctctctcccaactgcaggtccgactcaggagatgaacagctcccaactatttgccgggaagacccagagatacatggctatttcagggacccccactgcttgggggagcaggagtatttcagtagtgaggaatgctacgaggatgacagctcgcccacctggagcaggtgagctgctctggctcctgtggagagcgggaggccgccctgccctggtgctcggcccactccggaagccagggccaccggcagctgcacttgggcttcccctaaaaagcaaaatgggagcagaaactccaggccagagggagagtggagctggagaaagagagccgcagagaggcagggtgagggctattctttcagacctgttgccttatttccactaggggcctctgaggccttttagtgaaggcttgggaaatgggagatgggcctgcttcgtggctgggttaatgcctttccaccacccgtctttggagagatcagtttttgctgaattaacacttggagctctggcggccccagggctctgtgtggacggcggcttggccagcctggagctgggccaggtcctcatgcacagcacctgcctcctgccacttcaaggggtctctcggggagatgaagaaatgaggggtcactcagcagaggggtccatcttgcttctgtcctacagaaagaatgtttgttagtacaatgggcactctgctttaggaggcgtagcaggcggcacaggcggatgaaaatcgccctccaccctcttctctgaaccgcacctcactgtgaccaggggcccagtgaagtggaagtggaatggcagtgaggtggcttctggcatctgagccacagcctgaccctcaccctctgctcccgcagcccttccccgtgcctctctcaaatgcctgacttctgaaaccactgactctgagccagatgaactcgtgttcccttctctagggcttttgctcacactgtggcccctgcttggatgccctcactccgtctgctggcctcatcccccctgtcgagggcctgctctagggccttgctttttatttccatgactggaattgaaatccctcccccaacccccagaaaagaaaacctcacgaaccgcatgagttcctctcttccagcactggccctttccagctcgcatttgatttctgtgtgctcatggcattttctaagcccattgagggtggggctcatgcttcatgcatcttggtgtccttggtgcccagcacctggcagagggaaggcactcaggagaggggctctcacggaggaaatgagtgggtgagagcctggctcacaggacatctgcgatccacatttgccctggagctgagggatcaaaactgccagcacatccctcagcacaggcctccagtcctgtaatggcccttggtctccatctggaatcttccatgaaactgaggccagccttgttctcagccaatcctactgtgtccaagggaggaggcggggagaggagtatggatgtcagtctggcagggttgagtgacagagcttgttacctagaaccttactgccctcctctctgacctccaggcaaaactatggctactacagcagatacccaggcagaaacatcgactctgagaggccccgaggctaccatcatccccaaggattcttggaggacgatgactcgcccgtttgctatgattcacggagatctccaaggagacgcctactacctcccaccccagcatgtgaggccagattttttgttttgggtggaacctcccggggaacagtgtacctctcccccaacccccgctctgggggccggtgatggatgtgtgctgccaggtcaggatccttagtcctcaagaccagcccccagccagagagtgtgtctgctttccttcctttctcatccatatctcacgtgatagagctctagcctcttcagtgctatgcttgactctctttgagaagagagaggctgtggggccctaagattgcacgcacacatctggtaaggggtgttttgcatacatagcattgtctttgaacctgggaccatcctgagagggaggcaaaccacacacatgcttttgctgttgtcagccctgctgcactctgtgatggggtgactgagcccccaaaggggaagagtgggctcaagtgcagagctggctgtgccgcaggcctgtcttgcaaaaccccatgcctctgagggccacctgggcattctggtgtccatctgtcctcaggcccctccaagccttatcctcctccctcatctctgctcctcctccctccctcatcttccctcctcctcctccatcttccctcctcctccctcatcttccctcctcctccctcatcttccctcttcctccctcatcttccctcctcctcctctatcttccctcctcctcctccatcttccctcctcctccatctttcctcctcctccctcatcttccctcctcctcctcctcccgcatcttctcctcctccctcatcttctcctgctccctcatcttccctcctcctcctccctcatcttccctcctcctccctccctcatcttccctcctcctccgttcctccctcatcttccctcctcctccctcatgttccctcctcctcctccctcatgttccctcctcctcctccctcattttctctcatcttccctcatcttcctcctccttcgtcttctagcatcttcctttatcttcctcctccctcatctaccctcctcctccttcttttccctccccctctcctccctcctcctccctcctccctcctccctcatcttccctcctcccccttcctctcccttgccttccctcctcctccctcactttctctgcttctccctcatcttcctgtcaagtctgtcagtgccctctgctcacggggcaggttctggacttgttggtccccttcactctggggccaggaaacccatcccacctagaggggctggggctggggctggctgcttccacctgctttccctctgcagcggtgggtggcaggagctggcggatctgggtcatcctgagcaaggaactccagctgggggaagaggtgcagccctggccccttccagcccttggctgaacagtttcattttggacatgtgggcattttgctgatggttaaggactatccatttctggaatttctgaggaatgaagcatatttttgaacaggactctaatcagtaaccaaaaatagccgtgacacatcggcttctgagtctgccaactgcatatactataaagagcaccactgggaggtgcccagggccctctgcctcactccaactgtcacagccccactggggagtgtgaccagacccatttccatggttaatatttaattcctcagccctgaacacatgcagctaaatgaagtcactcctttcccataaatactagatgaagcagatgcaggtgaggccgggtgatggccctcgcccttgtgagttccactgccttcctcgggcctcggcctttgtctactgcctacttggccaagcaagcaagcacatgaatcccaccagccacagtgccagagaggagctgagtgggcaggagtggctgtgctcttgattcataaggtggttttgctttgctgccccgcagctcagaccttggacaggaagaacatttccctcctccacctgtgttctcagctgcagggggattccctcctcctccagagagtgttgtgcagagcacatgagatggtggggatccctggagcattttagaaatggaaaagcaccacatacaggagagggaccgctgctctcctttcccagcccccagcccggccattcgatctggaaacctatgctccacagcacagttggcccctgggtggtgcgtggagggaaggctttctgatgaggcagccgtgtgtgtcccatgtaggcaactgaaccaggaggccccacagtgcgcactgggcacgagagaccaggactggctgtctcgttcctctctgctgggcagtgcctagccaaggactcagcccggtctcttgtgtgcagccccagtgtgcctgggagtcctcccctggctaggccctgggctttccaatagcggaatgaggggcatgtggagttttgccagggctgagaaaggaggccctgtgatccgagaaaagcagcggtcaagataggagccatagaaatgccttgtaaacgataggtgtgctctcgacagaggcccctgcaaggggtaggaggtttctgggaggaggctgctggctgtgtcttagggccccagaattcagactgatctcccgggcctggtgccctgtgaagctgggagctgtggattgtcttgttaacctctgtgtgagcctctgttggaagagctgttagcaggacaagcattttcttaaaattagaggtgtcctttgtttgtattcagtgctagagaagctgaatctttcccaacaaaaataatttgcttattacctggtcaagctgatcagtgcaggtaaagtccctccctttaaaacaggtgtaaacacaggagccccagcaagatatgtcagctgctggggacacttagggtatctggaaggtgacagtgggaagtgtcgtggggttctggcaggacttgtgttcttgcactgaagtgctgtgcgctccccacagtatgcagcgccagggcttctgactcggatcagttgccctatgggctgccttcactcctcctcctgagaacaggcgaacgtttaaaagtagtaagttctctttgggaggctgaggcgggtggatcacgaggtcaggagatcgagaccatcctggctaacacggtgaaaccctgtctctactgaaaatacaaaatagtagccgggcgtggtggcgggcgcctgtagtcccagctactcgggaggctgaggcaggagaatggcgtgaacccgggaggtggagcttgcagtgagctgagattgcgccactgcactccagcctgggcgacagagccagactccatctcaaaaaaaaaaaaaaagtagtaagtttgtactttaaaaaacatccctcactggggcttctgccttcatcctctcctactaaagtttggagacctcactacctaatctttctcttggacaaaccgcatgcttcttcctgggctcgttgctgagcatccggggccaccctgactctgaaagacggtgtcccggcagagaacttgcttcacagctgtgtgatgccctttgctttcccagcccaccggagatcctccttcaactttgagtgcctgcgccggcagagcagccaggaagaggtcccgtcgtctcccatcttcccccatcgcacggccctgcctctgcatctaatgcagcaacaggtgagcggcccacctggccttgcccccacacctaggggcaccccacataggacccccatcaggtcactcccttctccttggccttaagcaccaggagggaaggagagaatcttcacctacagtctagttaatctttgtaacaatcctgtcaaatagctatggccatgagtcccatgctgcccaagctcacacaagtgactgctggcatttgaatccagggagccagctgccaaagctggcctcactgcccaggtgcctccctgcgatccccaccacctcttcctggcattgaatacagagcctgatgtgatctgagctcagggagtgggggccacttggctgattctgaacaagcggtgcagcccttcattttctctaagaagtggttccttcattaagtttatgggtccctccatgggcagggccctgtgggtactatgcagggttaacctcccctgcctacaaagggagcagtctggggagaacagtttgcccacgttgagggcggctgcacaggcaagagggtggggccggagcccactcactagggctttccctcaaggataacaatatggcgctttttctttctgaaaatatcacatcagagatgccattcattcgtgcacgacagggtggtgggcatggacctgtgctgtttacagacagcgttccccgtccctctctgcagagtgtgaaccccaaggtgcatctgccgtggtgggattgtaagaccggggcttgtacccagtgctttagcacatgccaaatgccggctctaggatgcattactccagagcaaagagaaccagctgttttcctataagtgctgggaagtggtagtttcccctgaatgtacttcggtatttaaacccagcatgaactgggtggtgtgttcacacccacagcttgttgggcttccctgattcttcattctgaagcaatttcatgaattagcaactgatacctccttgggaaaagccaaaggaaatgcattatggattcggggtaaaagaaagcacagtctgctagaaaacaaagtcatcaccgcccattcattcagcgtacttcagtgtgcccatgtcctttccaagtccttgcctggactgcccctggcgagcgcagcgccggtgcttggtctgtgcgcagaaggtttgaggcccggacctctgagaacctctggtctcccaacagtcccctctttcctcagatcatggcagttgccggcctagattcaagtaaagcccagaagtactcaccgagtcactcgacccggtcgtgggccacccctccagcaacccctccctaccgggactggacaccgtgctacacccccctgatccaagtggagcagtcagaggccctggaccaggtgaacggcagcctgccgtccctgcaccgcagctcctggtacacagacgagcccgacatctcctaccggactttcacaccagccagcctgactgtccccagcagcttccggaacaaaaacagcgacaagcagaggagtgcggacagcttggtggaggcagtgagtacggttcttggccgtggtgggcaggaagcaccaggagcagcagaggtgcaactgtaacagcaggaagggcagtggtgggagggcggccaggctgtgagctaggctgcctcaatcagacacttctgagcagcaggaatgtacctgaagcatgagtaaaaactggtcaccaccactggctgcagtggcttacgtctgtaatctcagcactttgggaggccgaggcgggtggatcacctgaggtcagcggctcaaagaccagccttgccaacatggtgaaaccccgtctctactaaaaatacaaaaattagccgggcgtggtggtgtatgcctgtaatcccagctactcaggaggctgcagcaggagaactgcttgaacccgggaggtggaggctgcagtgagccgagatcacaccactgcactccagcctgggccacagagcgagactcttgtctcaaaaaaaaaaaaaaaaaaaaaaaaaaaacaaaaactggtcaccaccgtcaattctcataaatgagctgtgctggcattatgggtgctgttccggcatatgtttctagtttatactaaatgtctttccccagtgggtttcactcttgttgggccatgtgtagttttttagctccaggacattttcaaagccatttacactagttattatgtatgaggtctagaaaacatgattgagctgcatccccaaagcacacggtgcagttaagttagcactggagttgatttttctgtcgtccccctgccctgcaaagccttataacacccccatgccatccatccctcttttctgtacaggtcctgatatccgaaggcttgggacgctatgcaagggacccaaaatttgtgtcagcaacaaaacacgaaatcgctgatgcctgtgacctcaccatcgacgagatggagagtgcagccagcaccctgcttaatgggaacgtgcgtccccgagccaacggggatgtgggccccctctcacaccggcaggactatgagctacaggactttggtcctggctacagcgacgaagagccagaccctgggagggatgaggaggacctggcggatgaaatgatatgcatcaccaccttgtagcccccagcgaggggcagactggctctggcctcaggtggggcgcaggagagccaggggaaaagtgcctcatagttaggaaagtttaggcactagttgggagtaatattcaattaattagacttttgtataagagatgtcatgcctcaagaaagccataaacctggtaggaacaggtcccaagcggttgagcctggcagagtaccatgcgctcggccccagctgcaggaaacagcaggccccgccctctcacagaggatgggtgaggaggccagacctgccctgccccattgtccagatgggcactgctgtggagtctgcttctcccatgtaccagggcaccaggcccacccaactgaaggcatggcggcggggtgcaggggaaagttaaaggtgatgacgatcatcacacctgtgtcgttacctcagccatcggtctagcatatcagtcactgggcccaacatatccatttttaaaccctttcccccaaatacactgcgtcctggttcctgtttagctgttctgaaatacggtgtgtaagtaagtcagaacccagctaccagtgattattgcgagggcaatgggacctcataaataaggttttctgtgatgtgacgccagtttacataagagaatatcactccgatggtcggtttctgactgtcacgctaagggcaactgtaaactggaataataatgcactcgcaaccaggtaaacttagatacactagtttgtttaaaattatagatttactgtacatgacttgtaatatactataatttgtatttgtaaagagatggtctatattttgtaattactgtattgtatttgaactgcagcaatatccatgggtcctaataattgtagttccccactaaaatctagaaattattagtatttttactcgggctatccagaagtagaagaaatagagccaattctcatttattcagcgaaaatcctctggggttaaaattttaagtttgaaagaacttgacactacagaaatttttctaaaatattttgagtcactataaacctatcatctttccacaagatataccagatgactatttgcagtcttttctttgggcaagagttccatgattttgatactgtacctttggatccaccatgggttgcaactgtctttggttttgtttgtttgacttgaaccaccctctggtaagtaagtaagtgaattacagagcaggtccagctggctgctctgccccttgggtatccatagttacggttttctctgtggcccacccagggtgttttttgcatcgctggtgcagaaatgcataggtggatgagatatagctgctcttgtcctctggggactggtggtgctgcttaagaaataaggggtgctggggacagaggagcaacgtggtgatctataggattggagtgtcggggtctgtacaaatcgtattgttgccttttacaaaactgctgtactgtatgttctctttgagggcttttatatgcaattgaatgagggctgaagttttcattagaatgcactcacactctgactgtacgtcctgatgaaaacccacttttggataattagaaccgtcaaggcttcattttctgtcaacagaattaggccgactgtcaggttaccttggcagggattccctgcaatcaaaaagatagatgataggtagcaattttggtccaaaatttttaatagtatacagacaacctgttaatttttttttttttttttttttttgtaaataacaaacaccactttgttatgaagaccttacaaacctcttcttaagacattcttactctgatccaggcaaaaacacttcaaggtttgtaaatgactctttcctgacataaatccttttttattaaaatgcaaaatgttcttcagaataaaactgtgtaataatttttatacttgggagtgctccttgcacagagctgtcatttgccagtgagagcctccgacagggcaggtactgtgccagggcagctctgaaattatggatattcttatcctcctggttccttcggtgccaatggtaacctaataccagccgcagggagcgccatttctcctaaagggctacaccactgtcaacattatcctggactctgtgtctctctctgttgggtcttgtggcatcacatcaggccaaaattgccagaccaggaccctaagtgtctgatagaggcgatgatcttttccaaagtcagtacttacaaactggcattcttacaggctgcaccatttcctagtatgtctgctttaagcctggttcaacctctcatcgaatattaaatttttctttgtaagaaaaatttgaagttgtagagcatggttttttgttttcccttgtcttaggaaagttttaagatgaaatgtttttcctttttggtcccctccccatctgaaaaacacacatttttgtgtccacaggaataacacatttagtttctttagtcttatgtttttcataatctcacaaaatgtaaatggcagctatgatttcaccgtcaactggcagcgagaacctcactaagaaccatctct

SEQ ID NO: 75 - DNA, 71531 bp, Homo sapiens
  source 1..71531: mol_type = genomic DNA
aggcccccacactcctgccttccagttcctcggcccaccccaggtgctgtgtgtccttccgggccccagctgggcagggcctcttcttcaccctgcacgatgtggcccacccgggggaggtcctgcttctctgctgctcacccgcaggtgggaagccacagccgccccacagcctctccgggtctggggtctcagggtgcgccctggagcagggcctctttgtctggagggagaaggggtctctcccactaccaggggccccttgttggcgggcgtgctgaggtgcacacctgggagctcaagctccctggtgcacaaagcagtggtcccagaagcaaaaccacccttccagcctggaggggtgccctggggggagtcaggagcctgggcacctgcccccacctgctggcacctcgaggtgcggccagccctccctgggacaagggcctggccatccccaatgtctgaagggtccaccccttcccgaccaaaccacttgctctgagggtccaggggaaggcccttctgctggcctggctgaaggagcagctgctggcagggggaaggggcctgcacttctcctcgggggcccctgggtgagtctcgctgaggcagcggggttggaggatgcaggagcaccaggctgccgtccccagggtcccccagatccccacgcgggaggggaccggagacgaggacaagttcgcggaaactgcccgtgcgtgtcggggagagatgcgagtgcaggagcgcccagccgtaaagcacacccccgcccgcccccgcgccccatcacacacgcgcgcgcgggcacacccgggacacacacgcggcggggaaggggcacgcagcctctcgccttccacgcccgcccggtccccgcccctccgccgacccgggcccgcgtcgtagtgggggtgggggtgggggcggcggcggcgcgcgcggcagcgcgaagggggagggggagccggagcgggagggggaggggcgcggcatcggcggctcggccgcccccgcagttgggggcagggaaggacgtaggtgctccccctcccaccccgccggagcctcccgcgagcgccccctggtgcaccccacgcccggcattgttggggagcacgaaaagcggggagcccagtgcgggggcgtggagggggcgcgggcggggtccaacttcccgcacccgggggggggcggggcgccgggcggcgacagggaggggtcgctcgggcgcgcgcgtctcgggccgggggcggatcctccccagtacccccccgcccgccccgcccccggccccgccccggccacgctggccccgccccggtcgcgccggccccgccccgccccgccccccgccgctcagcccgaagtttcctgcgccgcgcgcggacgggctcgaggctcgctcgctgcctcaccggtccccggcccgcgccccgcgccccgcgccccgcgccccggcctcacccgtccgctcagcggcctccacgccgcgccgaggccgccgccgtcgcctccgccgggcgagccggagccggagtcgagccgcggccgggagccgggcgggctggggacgcgggccgggggcggaggcgctgggggccggggccggggccgggggcggaggcgctgggggccggggccggggccgggcgccgagcggggtccgcggtgaccgcgccgcccgggcgatgcccgcggggacgccgccggccagcagagcgaggtgagacgcggcgaggacgcgcgcccgggaccctcttcaacttgcgcgaagcgggccggggagcccctcggggtgggggtggggccgctggagggagggagggggcgggcgggggcggggggcgcgtttgtctctaataagaaaagacaaagacatcccggcggccgcggctgttcccgcagctccgcgccgcgggaggcagggcgggggcgtcgccaccggccccgggtcaccccctgtcctctgcaggtgctgccggccgccaccatgaccgagggcgcacgggccgccgacgaggtccgggtgcccctgggcgcgccgccccctggccctgcggcgttggtgggggcgtccccggagagccccggggcgccgggacgcgaggcggagcgggggtccgagctcggcgtgtcaccctccgagagcccggcggccgagcgcggcgcggagctgggtgccgacgaggagcagcgcgtcccgtacccggccttggcggccacggtcttcttctgcctcggtcagaccacgcggccgcgcagctggtgcctccggctggtctgcaacccatatccttcccggccggcggggggcggggggcggggggcgtggggagggtgggggcccggggcgcgggactccctcggcatgcgcccccgcgcgcccctgttggtgggacctggcgtgggccgggcgcgcgggggtgcagggcaggggctggaggaccgcgctctaatttctgagagtggcgggcttggggggccaccgggcgcctccggactcccttccccagggccggctccggacggagaaggtggaagcgaagcggtgaggcccccgcgggcttggaggggagaggagtcggggagggagggaaggtcctaactcctcgcggccccaagggtgttggccaggacgggaatttcccccttgcccacccctcactgtctgaaggtcctgcccgaggcaggcccctcgcgggggagggggaggccagaggagctggagtcaggggcgcaaagttttcagccggcgcctggtggttccgagtgcgtggggagacccgtggggcctgtgagcgccgccagggccttttccgtggagagaggcggtgacgttggttgtgaactcgctttttctggctgaactcggtggcggggctgacttaagtcatgcgcagctgaagggtagggggcagggaggcaattggcactgccaagggggagtctcatctccccagccccttccctggctggagaggaagaggcagcctcttctactctcggccagagcggcacagactgcagagaaggttccagaacagagttgggtcagggccaggggcatttgtgggatgtacacggaggtccagggggccccccagcaggtggccttgggggcgggtctccgcgtgccctgagaagggccttgcgtggtgcctgtgtcagggccgggtctccccaccggcccttctgagccggcagctggggtggccaggccgtggcttctgctccgggcctggggacgggtggagagaccctgcccgcagacgtcccccgtcggaggtggggagacaggctggcagcaggagcggcctgtgtacacttccctaccttgtgtgtttaactgtacaaatattaaacacgaaagaggaatctgtacaaaaaaagtcataaagcccgtgtttctcctttctcaaatccaaacatcgagtgagtcagactcatctctgcttgtagaggaagaggaggctgctgtggtcccgggggcagccggccccggccagagggctgcctcggagccccacacccgctgcccgggcggcctaggcctctgtagcctcagggtggtgtctgcgagtaggtgggtgtccccgggagccgaggtgcaggcccggccttgaagagcggttgtaggtttgtctcctctctagaaccaaggcgggaggtggtcatgcccctttgttctggtaggaggtgactgggtgtggggttagtccggcggtgccagcaggccatggggaagggtctggaagggactgcatgggttggaatgggaggctggccccgagccaaggcctgcgttccttgtttcccaacgtgtgcagaccggagaagggaaagagttgagcaagcctggactctctcctcacagccccgggcctggctgccccatccccaagcagggcatggactctcttcacagccccgggcctggctgtcctgtcccctctcggctgagagagttttggagcctggccccggtgttctgggctggctgtgtgtctcaggacttccaaggaggttgtttgcgttgctgtgtgcagggaaggtgttggctgggtggcctcatgcaggtgggatgagctctccagggggagaggagggctggggccagcggcatcacgtgacccaagcgctgtcccccggtgtcctgaggagctgtccttttgggctttgtgacctgacaggagtatgctctggtagcccgagagggacttgggtgctgtcctggtctcgggggctggatggtgctctcagcctgggaagaacagagcatgccccatccctggtgtccccagggctctctgggctgggagagaatgggtggtcggcctcctgcccttcgatggcatcccttgcttggagcactgggtctgcctgcggcacggcaggaccccccaccctcctcgccgccagcacctctggcacgctttggctctcccagctccaaacgcagtgatggggggtgtccccactccaggagacatgggaagcagagcttagaccccaagcttggttcattcttggccccgtggaaacgcccgtcggtcaggtggagtgggcttgtggaggccccggctgcatgggggtgggtgtgaccaccagcagatgcctggcctgtagcgagggtgtgtgtcctggcgtcagagagaacctaaaataagctggcaggcctggacaggtggggggattggctgagccggggaagcccatgtgggccatggctgaggctttccagagcgcttcagattcctgggagttgggagggggaggctttgcaggaggcggcaggggcggtgggcgactggtgtggctggggtgtgtcccgtagcaagagggtgcttcctgggcctcagcctcccctccctccgcagggccccgcatccctcctgaagagggtgaactctgagagggagggataatcggatttgctcagggaacccacactcagtaaagtgactccatgctcccgggggttggcagagccccagctgctgtccgccgggcccagcctgagccggggttcagtcagcacaggaacctgggggagggcccgcgtttatccctgaacctctcctgaaccccggggtagacgctcagcaccagggagcacatgcgtgctggctccatctccagggtgactccatcccaggcaaaggagcctccaaggacgcccttatccttattgattggtttcttaaaaatataattgtcttagaacttttggggcgagcgctgcttctcctccacaggtttatttatagagaaaggtgggtgggatctgtgtgttgtcgcccggctgggttatgtgctgcccggactcccggggttcctgactccgcgttcgcctgcgacacagctgccgccgtcccggcacacggacggggcggggcccccgggaatgcttggaggccaggaagggggaccctgcttcggtccctgcgagagcgagggaggcgggctgtgggtgtgtagggaccagaaggtgaccaaggggtgcttgggggctgggggttggcaggaccccctgggaggcgtctcccggggcccaggctccaaacaccccgtgtcacggagctctgagatggggaaggatatatcaaggtcatcgggatgctgaaggacagagctgggtgagcccatcctggctctgagggccacgtgtttggcagagcgctgcctgggtggggacgagctgcgggagcctgagacagcccttcatggcatctctgaacactcggcgctggggctgtcacgctgctccgcgggcgtcccccgggagtgtgagagggcacccgtctggaaagggccagtcccgcctgcgcccgcctccccgggctccacgtgccccgcaggcctctcgtgggcaggacggggctggtcgtcccctactgaccttgcatcgtggggaccctcttgaacactttgtcttagcagcgtccggacatccgaactggtctcagaggggctgcctcagtggtcggaagtcacaggcccaggagggcccaaagctgtcccttgacccctgggcctgaactccaagctgggggtcactcagcagggtggggcttggcagagtctccgttacagactggacgtcccgtcccttctgcctgggtggaccagggtgtgaactcggccgttgcgcccgacccacggcccggcttctctcggccgtgctagggcgcgtgtctcccggagaccctgggctgcccgtgccttgcccgtggcgcccttgcccgtggcacccttgcccgtggcgcccttgcccgcattctgacgggaaggagagttgcagggatggatccattagtctctgaagccaccgactggcattgcagtgttcctgggacaggtgtgggttcccactgagccctacggcctacccacgagagggctggatgtgtccctgcctcctgggctagtacagggtgggagaggctgcctccccacccccacagctgatcctgcaaggaagcagagacacagatggggctgagactgggagcgttgcagggctcagggggaggggccttcccactcaccaagagctgggggagccgtgggggcagctcatccttcctggggcgatgggaagagaggcccccgggggtgacgacagggtagggggtccgccgagcgcctgggggcagctcatccttcccggggtgatgggaagagaggcccccggggatgatggcagggtaggggtctgccgagcgcctgtcgtagtcattccctccccttcatggaagcatcagggccgcacgccccgtgggacgtcatcttgttcccgccaggaagtgggcgtgacgccagcaggctgagctcaccctccgggtcggggctaccccgatggactcgggactcaggccccgctggggaggagggaggagatggagcccagagcaggccgggccctggcagggaccgtgcgcctcccagacccgcttctgcggccggggctgccgggcatgtgaccttggtgctcttgggaacgagtttgccgagagagctctagttccacaaccgctcctgccccgccgcacccccggccccgcagggcgccactcagcccgcacccccggccccacagggccccgctcagcccgcacccctggccccgcagggcccccgctcagcccgcacccctggccccgcagagcccccccgctcagcccgcaccgctgggaccgggcaggggtctcgggtttcaccgtccgtctgtcgcccggatccttcatcgctgggatcgtccttggcactgactgacctcagggcccctgttcgcctgcctgaggcacttcagggtggagggagtccctgagcacagccttcaggccctgatggggggacttggggagccgtgcagagtggggagagcctctgaacgccttggcagacgtcttcatggccagttccccgcagagtgcccgggtgtccgtatcccggggtagaacgaggctggcctgagccctgtgaccgaggcatggtcggggcccctcggacggtggggtgggcccgacaggggcagagtccatgagcccggtgggcacaggagcctgtgcgggaggaggcgttcggactgagacctggatggggtgtgccgagggaagaacgtccaggcagggggacagtgcaggccttgaggtggggggatgtctgtatagcagatgagagggagggtgaggggcagggtgggccgtggggaggaggtctgggcgcgtggcggtggcacaccggtgtgatgacccagttcccgagcctgccctcgggagcttgagggctgtgaggaggcagagtgcgggtggggacagcaggtggtgggctggcctgggggcccagggctcagcttgcctccaactggcgtcacaactgctccttagggaggggaggcctgggggccgggcttagcaggaagtcgatgagagagacggggctggaagggcaggtgagggccgcacagggacagaggctgggagtggggagcactggtgtcccacacactcaggcccagagggcgtggctgctgccagcccctgaaggaagctcttggactcgtgggcaacacgctccaagcacccgaacttcattcttgccggggccagctgcgggcaccctccctggcctggtggaacgctcaggggtggttctgcatactcccctcacctcccccaagggctgagagccgagggcgatgcggccccaccaggccgggctcctggagctgcagaagagacgtcccgttccggggtcaggacaggaggaatgcgggggaggggccagcctgtcaaacactccggggatggatccacagcagctctgctggctgagtccaagccacggtcgcacagtcaaggtcaggcgaggaacgcgttacctttgtttatgcagatgtcggccaggccgtccgtccagccgcctgtgccgagcccgctgtgggaagggcggggactgtccctgcctgtcctcgtcagtgggcattcccctccctggcacggaagaggagtctctcctcagtggctcatgttggcgtaacttggaacaactctaagtcacgcgggcccaggttgaatttccagggtggagattaaggagcgaccactcaccctgggcagatacaaggggtgaagtcagccggtcgcgccctgagcagtgatggacggccgcctcggtcagagatggtgggggcggggctcggggaaggagctctgctggctctcagcccctgcccggctcaggagagctggcagcaggtctgggcaccgtccccagagcactgtgcccgccgaggatgacagatggggacggagtagcagcttgccgtggtgcagggggtgtgccgccacgtggccgctggtgtccctggcctccgtgcacactcctcgcggggcggaggtgggcccgggctgacgggagaagcgggccgttggcggggccgtgagagcccccgggtttgatgagccggacggttgatgaatgtgctccacgaggcctcctttgtcctcttgctgccgcccggtcgcttgccgggagcgggagctgtgggcagagagatccttgggtgggtgtggccgccgcctgcgtttggaggccccgtgcagcgtcaacccgggacgccagagcaccccatcctcgggtgcgcggccggcgaggaccgaggcatcagcccagtgcggcccccccccagcctcggtgcagccctgggctctttgcccaagttgagagcagggctggcagggagaggatccggaggcccccacgctgcctcggggtgaagaggctcctctgacccccaaggtgtgtagacctgacacagttgcacccccagccctgctttgatgtctgcagaactggctcctgcagaaaaggccttgagcgagacctcagcgtctgctggccctgctggactcgtctgaccctgggctgctggtggtgtgggtgcttctgccgttggcgactgatgggagcgaagctgttcctttgtggatggaccgttaggtgacacgggatgttggcattaatgaacgctgtcaactgagccggtggcagaggtgggggcaagccctcgcctctgttgaccgccaggccgccctgtgttctcaccccttctcccctccccagctgtctgcacctgggcagagccccctggccggaggtggttgtctctgggcccctcactggcctgaggactgaggtggggataccttgaggcctttttttgggcaaggtggtctttagtagccccagatgttaaagactcagcctcaactgggtggagcctcctgggattctggggtctccatggccacaggaggggggctagcgacccctgccagcctgggcagtgcctccacgtgggcctcagtttccctgtcacaccactttggtctgtcatctcggtcactgatggagtgaggctcccagcaggcgggtgagagaaggggccagatgcggtcccgggagataggctgtcagccccgtccagtcggtgggtggccagtgcggcggctgatgggggacagaccgctggccaggccccacgccagccctgtccccatctgtgagcagcacccggacctcctgggtccccttgccgcagcctgcctgtggggtgggtccgtggggtgggcctggtcggacgcgttaatggagctgcaggcaaggctcggggcagatctttctagaaggcagcagagccatcacggtgggtcaggctgtgtcccgtgaagtctgaagtggactggcagaggtgggcactgaggtccctgctccggaccctgtcggggtcgtgtcacctcctgggcgttggttttctcatctgtgaaatgggcctgctgccctcctggcctctgggtgtgtggcggggactcctcgtccccactcagtcccatgggtgatgcaggacatgggatcctgtcagccccatgacccctcgccctgggcctctggcctccagagccccaagaggccattgctgtctgaggcccctacctgtggcactctgttacagctgcctcctgccagggtgcccccacctgccctcacagctgcgagcaggggtgcaggtgcctgggggaggcccccagcacctgcttggccctttccccacctcacctgtgggcccccccggagggagaaaaatggcccatgagcaggaggtgcttgacgcagtaacaggagtcagcccctttcaggatgaatcgcgattggtcgcccactgttgtcaggctcctccgatgaggagcagcccccagagagagaggacgcttagccgtgaagtgggtcattcggagcctcggttggcacgggggctggtgctgcagttgtgtctctgtgccctggttagaagctgccccgcacggccagctcctgcggacacctggagtggggggggggggtccatcctaggaggagccgagcgtcttgggaccctgtgaaggggtctgggggccgcacttggctctggtgagcagggaacaagatggatgagacccgggccccactgacgctgggaggacagtgtccaagctgggggaccatccgccagggctgtggcgtgaaggccgagggagtatgagcagggggtgggatagtcccaggtggctggaaacagctgtggtcaggtgggcgagcagaggtcagtggccccaggtccctggaacgcctcttctcacggccactccacgggtgcctggccctgcggccacgcggagctatccttggctccagcctcaaaggctgtgggggcacagtggccggtgctctgcctgcctggaccttgggctcgtctgactctgtgtttgctgtgtgtccctcactcgtcacccagcctctctgttctgggcaggtgaggcagcctgcagaaaggtgtaggtgtgggccagtctgccctggggagccgatcctgggtccggagaggcgacagccacctcccccagctcggccatggaccttgaggcttgagactgtgccctggtgcccgtctgcagggcagtgggggtggcctcggcccagcagggccaggtgggtgtcgggcgttgagtggggcccagttggagcagggcctgggaggccggcgccggggtacggtgtggagctacgagtctccccatggcacctcgtgctcccgggagggggtgctggtctggcctgggagtgtccagtgagctgccggcctgtgcccagccccctctgaagccgcagccacacacagcccggcctgcctcagaggggaaacccgtgtccagatggccagagagcagccacgacctgccgggaaggtgtggaggggcgagggtctctctcagggccacacacacggtccctgccctggtctttgcgggcagccgccagccctggctgtggtctgatgagtcagcctgcattagcgcctcattgaaatggatgggaacttgtcccgggctgctgggggaagctggccgctgtgtctgaggatggcttagggtactgccttggctggtagctgggaccacgcttgcccaagcccactgggccacgggctcttgtgccagtgctgacctcacacttgggtgccagggtgagaggccccgggatgccacctcctctccctgggaagcctggtcgttgtgatgagaagctgggctatgtggcggccacctcgaaggccaggtctggggaccctcccgcttgtgactcagcggctcagcttcttggttagtgaagaggggagaggccgtgtctggctcagccgcccctgccccagccgaggagcagccgatgggtgcggcctgttggtgctgctggggtgtgagactgcctggccgccggccgggtatggaggccggcacaggtgtgggggcacttttgcctctcccagaagccacagaagcaagggccctgggcctgagtccctgacacagaaaacccaggatgcccgttcagttatgtttggatttcagttaagtaagaatgtcttagggtgaggggtgtccatgcatgtttgagacgggcggcagtgtcgtcagttgcaggggtgcagtccaaggccccaggaatacccgaagcctcagatctgatgaaccctgtcctgtacgtactgttttttcttttcttttttgagacaaggtctcaccctgtcgcccaggctgagtgcagtggtgcagtcacccctcactgccacctcgatctcctggttcaggtgaccctcctgcctcagcctccccaggtgccaggattacaggtgtgagccaccacgccgggcctcatactctgttctctcagcctgataactgagatggctgctaagtggccatcaggtgggcagtggcctgcagcgtgggcacaggggcgatttggaccccgggcggtgccgagcgtggctacaccaggctcactgctgcacagaatggggcacagttaaaacctgggagtgaggcctttccgtcggagacccttcggatctcccttctgtgagatcttggccctcaagccccgcagaggggcctcctggggttctgtcggtggagctggggtctggtggtgctgccctcactggccgggctccggatatgctgcttggggtggagggcggctgtccacagccctggggtctggaggaggtgtgggtgagcccgtggccccgtttgggtttttgggggtgggtcgagtcgccccttttgctggtccctggcttggcagatgtgtgttttctccttgggtgcagcaggtggggcccctcggtccagcatgggctgacctcagggtgatttgtctccgtggggttctggggcgtgaaggacacctgtgcaggggtgggaacagtggcgctcacctgaccggggcaaggagggggctgatggggcaggaggagcggagaaggtgctggcatgtctgggcccgggagtgggtgggggtgcggcaggcaccagctgaccaccgtggcgcgattgctggggagacggggggaagagcagagagcacacgaggcacaggccccattggaggaacattctagaagccagatgtagcgtcacaggaatggcttcagcgggcctgggggcaaaggctcagaatcggcagacccagaccccagttggtgtgtttgaaagctgagcctgctggtcctcccgggccacgctctttcgtgacagcacagagtttttattttctaaccttccgtggaaatctgggtcactcaaataaggaggatgaggcctatggtctcagggagccgcgtgggccgagcccccgtcctgcgcactcacagccggggagctccaggtggagagagaggcgcctgggcccccctccccacctggcctccggtgcatctgggcatgggaattcaggcagcacaagccggcccggagctgaggcaccctcccttttccccgccaggcacagctgcgtccccccgaggccattgccaggtggctgcacgctggggtcacccctcctgaggatgtagaggggctgcctccctgcccccaccccggctcacagtgcgggtggctcccggctctcctgagttgtgctggccacctcacgttccccaccagatgaacccatcagcccatggtttcctttctccccaggaggtttggggctgggagctggttcctctgctccccttgggagaggggtgggtcctctggcccctgcttgggtggtgtgtggggcccggcccggccgtgtggggcaagagtggtgggcacaccggcccgtgcatcttttaattgtggtggctctttctgggctgaggtcccttctcggtcctcctcgtcctgttggcaccgtagggggacacattcccatttgtgacttggaattgggtgactctgagagctgacgccgagatttcttgtttgtgttttctcactcagactcagaggatggtgaggcctggggaaggggcaggcaggcctgagaggacagtgggtgttggggtgagggtgcctcttgcccctgggggcaggcagagtgtccacgagcaaatcctttgcgtccggagtggggtcttcactggctgctccatttgtctgcgtggggagcgggagacaggagctccctgtggctcagaccctgctcagctccgtggctccaggccaagtaacggtgccctgaatcccggcccctgccttcctctcagccctgcagaggaggccgcgcagcgtacaaggccctctggccagcccggcaccaactcattcctgttgttggtcttttcccagttttattgagaggtaatttatccaccacctaactcgccaatgaagggtccaattcggtcgttctccctgtatcctcgcggtggtgcagccccagcagcgatgggttccagaatgctttcctcgccccgagaggaaaccctgcagtcagctgtctcggcgtctcccgctggccttttccgtctccgaggttggcctgttctggacgttccctgtatatgggatcccacgtggtgtggactcctgcaccggcttctctcgagctttgtgcgggccggtcgtccatcctccccgcagagccctgacccttccacggttagatgcgccctcatgtagacgggctgcggtgtttatctcttcaccgctggtggatgtctgggccgtttcaccctttgctgctgttcatggcgctgccgggccgtccctgctccaggttcgggggaaaccctggcttcgtgtctcttggacgtaaatctgggagcaaaattgctgggtcaggcggaaacagtgttgagtcctcggaggaatggccaggctgttttccaaagcggtgcccacctgttgacccacctctcgcccccagcttttgggtccctgagtggtggttcagcagcagtgagtgctgacaaccacacccagccggagtccagggctgtgggagtggacacggcccttcctttcctcgccgaccctttggggcgtctcccatcgggaaatggcagcccctgacctgccccgtggggatgaaacgggctctttgcggggggcctgtggggtatgggcctcctgtcagcagcccgtcccggtgggtggggcttgccggccgcccgcgaatgtcaggaaccttggattcctgacacacgggtgcgggggcgatatcggcgcggagcgggcggggtggcgcccgggccgcgggtgggagaatctggcgtgtgtgtttgcacggcatccatccctccatccgtcctctggagaatttcaacacccacacttggaataaaaaaaaaaattattaatgagcttggtgcggttgccatgggaacctgttgctaatgaatctctggggtttcctgttacctttgccaagtcgaggaaggctggagccacactcctcaccgcggcggtgccactaatggggttgccgtggcaacgcctgtcactaatccccagctgctcctggttgaccggcccggcctgtgttacataaagcggtttggcccatgcaagccggctcctggctagggaccccgagacccctcctttgcttcctgaaaggagcccacccctccttcagggacacacccagacacgggaaacgggacacctggagctgtggcgctggtgtgtgcttagaaagtgcacctgcgaggttggggcgtggcctggccgtccgtccgcggggcccgggctgcccatggcagcaggtgctcagtaagcactcgccccaccagtgcgtggagcacgtggggcctcaggagccaggcctgttccccggggctgcctggaggcggccgcttgtccccaaggcctggtgaccgcacctctgtctgccctaggccttcgagttgggggacattttgtaaggagccgctgtgcctaggccagagatgttttcggaaggggtgcctgtaccccgagaggtggaccagaattcccctggggcacggtggcgggagaccagggcggcctctggtgcccccgccccctccagttggggcggttgatgtgggatccccccccccaagtgacagtttctgcccagctcaccccgatgagcccaccatgtccagtctgtttggacgctggccatccagcaacccccatctcctccctcctagggcctgaggcctgcagttcccaaagcaggaaggtctgaagctggtagagtccatgcagtccgaccacccaccccggggcgtggttctaggatggggccaacgatgtggggaggctcctgggcaggcggggaggctgctggacttgtgattgtggctcctgcttgggctgctctgggggaccctccagcttccctgccgggtgcccaggtcaccccagagctggggagatgcaccctggaggcagggagggctccctggaggtggtgacaggtggggtcgtggtggggaggttgatgatccagtgtgtctggtggtcctcagtgtcccccgagcccctcatgcatcgtgctcggccgagttggccctgtgtcaggagcctgctgggccccactcattgccctccagacccttccagagtcccagggcaccatgccccactctgggtgccttgtcctagggggatcatggcgccccccagccttgccctccaggcctctcctggagcctgaggcccgaggaggggtgaggctgtctgcatcgggtactccctcctcctcagcccgctccccactttaggggccgcagggggtgccccgctctgaagtaccctggcctgtgagcctctaggaggtgggctggggccgccccctgcccgcctggggtgagtctgcccacagtggagtcttagggtgatgccagggcgttctctgccagggttacgagtgcgtgggctcgggtgctccataagcatgcagccttggcaacaggagatggagggaggaaaggttctggactgttccagataccagaacgctgggtgtgcatcccagagcctgcctggcagcggccagtcttcctgcggcggggtgggggtgggggtgggggtggggcttgctgggggtcttagcctggaacgtggacgtggacgtggacgggcttcctttgccgctatgttcactgtgggcggcaccgtcgctggtggccgaatctgccccaaacagcacttggtgaagggctggcatcagatgatgcatgggctggcagaacccccgacctgccctcccaccctctgacacaggtgtcgtggactgggctggtgggttgggccccgagagggtggcaggggcattcgccttggtcctcgccagcatgcccgcggcccccgcgacgttcccccaagaagcagcagcagggcttggcgggcacagcgcgtgtctcgggttccccgtgggcagcgaccccaagctccagcctctcccaccgagagacacttcagagctgtgcgggccgtgctttcgcctccgcccatcagccggctcccgggctcccggtgcttccctcggagatcagggaggccccagcccacttgtctgggtcggccacaggccgctgggggcagctgacaccactgtggctgtgggagcttcaggccagccggctggtgcttgttcccaggaacgtttgtccgtctgcctcccaggcctggtccctggcccctggccccagggtgagcagggcccatctagagcccaggaccggcttccccgtgaggccggacatgggcgtgtgcgaccgcccagcactgcagtcacgctgggaagctcgggtttggagctgggcggctggggtgtttttctgagcgtttgaaatatggcctgcccacgggtcgggatcaaggatgttttaattcctaatttagactgtttatgtgcagggctcaagtcccggtgggaagagacagtgtgggctgagcccccctcccccgctcgcctctccagggcggcctcccggcttacagcgagctcccagcagctggggggtgcagggtctgcctgcaggtgtgccaggggaggggcctgacctctgcaccctgaccccagcccacccgggtgtgtcccaactgcagggttaccgaggctcagcccaccctgttcccactcagtgcagagccttctttgtgaggggcgggcccctccccacgccttcgggcctttccctgggttggggagctgaggtcgcaccatggctatggggcagcagggctccctgggacggagccagcgggacagggcccgaggaatccggggtaacactgggcagaagcagctgtcagcatggtttcccgtaaaagagactgggagagagacagaggcaggggaggggagcgggtggacgggaggagatggaccgtgaacagtgaaagacgtaccccgacaccggcctgcggacccccacaagcccagtggccgtcagccttgggattttggggttttccaactttaatcagggaatgtctgtctcccctgcatgagtgatctgtggagcctggtcggcatcctgattgtcatgccgaccgagtttgtggggccctcctcgtgcccccacgatctggacagggatttcggggtgagggaagctgggctgggttgggcccccccaccgccgtgtgcaggaggaagaggccaggagaccagggcatgatggggcagctccccactgcaccccttctttcctgtgggctgtgcaggttttctttttgttttgggtgctggccccggtcctgtgggtcagggttcaaggcgccaaccccgcattgtctgcttggctcagtggttcccgtgtggagggttggggtgcctggtctgggggccttctgctccccagggggacaggtacagccaggtgtcaggacagggcagatcctctctctagctctccccccaaccactgcacccatagcccgtccctccctcttcctgcacacccttggctccctgtcccactccacggccaggcctttgtccctgctgagcccctcccctcccctagtgccttcccacccgcacccctggggtgctctctggggagccctggaagtccctgccctgcccagctgtctgctcacccccgcgccgcccaggatcacctcctcgtggggaggtctctcgggcagcctgctctgtggggccctcctgggcgggctgggcgtctggggggatcgtggggctttggggctgtcagcagcccaggggggtaagaggacgaggcccagatgggccagtggccctggggacaggctttccttagaaagtcactgggttcccgggcagagaacccccgcagcccactttttggccctgggctctgaccacagagtctgcagagcctggagcccggaggaggcccgcgggaagcttctggaaacaaaggtcgaatggagatgggggtcagggtgggttttattttccaggcattaaactcccttggctgccgcagaaaaccagaggcgcctcaggcggcttttgtccctcggagctgtggggttccctcatttccagtttgccaaggccgcctgggggctgcctccgtccttcccgcctcctgggccgtgcctcggcccacagagaccaccaccctccctccctcctggagtccctggagctctgggcagcctcccaccgtccacaactttgccaccctctcaggctgggcagacactacccccaactcggctccgtctccgagcgccagctgggtctgaggcgtctgttctgggctcttctcgcccacagacgagagggtcagggcagagcccaaggccagggagcagtgtccacgggtgggggcatgttcacaggccaggcgggcgccaggacggacgctggggtccaagtgcggcatggggttcgcgtgggccccccgccaggtgctgtggagtccgagtgggtcggctcaaggtcctggggtccccagcagccttcactgaactctgaagccagcctgcaggtgtcagacgtcaccgggatgatgctggggtggacggggccccgggccgcagggcgtgggccgcacacggtgggtgtcaggggcgagagtggctgcgtgcctcgatccggctggcccagggcgagtctgcctttcctgcctgaccccgcccctggagcttggcagggagttggggctggggctccccccacagtgcatcaccgcagccttgcctgttgagtagaaaggagctcggggagccaggccgtgccatccccaatgttccaggctctacctgggcccctctcacgccgtccctaggctgcccccaggcgtcctcccctcttagacggtggcagcgcggctgccctcaccctgccctgggcctggcccgcctccgtctggggtggtcgtggggtccccagcaggacacgtaagtacctgtgtgttgtcccgagcatcacccgctctgtggagggaaccccgaggcgtgggagcagtgggtagtctgcactccacaccgctggatcctagcaggagctcccggcttctgtaattaaacgatttattattaaagcagccgctttcccataaccggcttcctgtagccacaggggcagagccacccgcatgggtgtggggcagggaggtgcatggggtgagctggggcacccttctccccggggcacccaggggcggagtgggctgctgctgcctgggtgcccccgagggctcctgtccaggcccagggctgtgggctgggaggactcacggctttgctcctccgaggcggggcaggggctgtgatcagggccaggacagccccgtggggactctcgcagtcactggccctaagccttgttggtcctcggcagctggccccagggacaccaggtccctgcaggtgggtgctgcctgggagggaggggaggggtggggccagagtcccagggccgcagacctgccctgggtgtggcgtggagagccctctgtgtggccatgggcctggggagctgggaagcccaagtgtccttgtggatattggggtgtcgaggtgtggggcaagttggaggtcctagcgtgtttaagcagctgacgggcgcgaggtggaggtgtccaaaaggccgaggctggaagggggcagtagatggggtgctggtggccaggcagggaggaaaggggtgcggagctttgcaggggtttgggtgggtggcatcgggaggcccagcaggcaaaaggtggccagagccctggggtagtgggatgcccttccggagtgtgggatgaggcgtgctcccccacaacctccagaacagcggctgcgcctccaggcctcgggccccttcacgctggtgcggacggacgaagcccaaagcctctgctcctgggttctctctctcgctatttacttttttagtatttaacatgaaaaattttaaaaaattgtttactaacttaaccacaataataagccctttgtgtgttaacataacacgtccttttatggaaaaggttatatttctcaaaacgttaaaaactcagtgagaagaggggctgtgttttgcagttttgcaagaccctctgcctggcctggtggaagcatccgggaacgcccgtcggaggggtgagggaaggagggtggggctccccggccgccgtgctgagaaccactggtctaaaccagcaggctcaccccgggagaattcccctactcctgaaaggctgtgggtgttgacctgtgcacacagtggggcctcacaccacatgggagttgtggacattaacctgtgcacacagtgggacctcacgtcacgtggggctgtggacatttacctgtgcacacagtggggcctcacaccacatgggagttgtggacattaacctgtgcacacagtgggacctcacgtcacgtggggctgtgggcattgacctgcgtgcacagtagggcctcacatcatgcgggcctgtggaagttgacctgtgcatacagtgggcctcctgatacggggagctgtcacctagctggcctcacagtccatgcagctctgagacccaccacagagccgtggcccctcagatgaggggactgaagcagagagtctccaaggaagggcagaggtcctggcggcctcagtttgctcctccctctcatggcacccggctgaagtctcctgtggggctcctgggttcaaggccaccccatggccacgggccagctgcctttctctcatttctcctggagcgcacccttggtgggagctagaccccagagcccaggatatggaggtaactaatgtttcacagcagccaagcatgaatttagcccattgctgccaggatggggggctccatctcggggtgctggcatgaggctttcaacagctgcggtcagcacagcccacctggcccagcctggactctgcagggtggcagctggggtgtggccatggggagggagggagggaaggaaggatggggtcactgtagctctcgaagggaagcccctgccacgctcagggctgtctgggcccctccccaagcaggggcagaggtaccttccagaacacagcagaacagcgtgtgtccagcccccagctgggagaggagaggcgcccaatgttagtttaaaaaaaaatgactcagacagttcacagagccttccttttcctgctggcttccaagaattccgatctgacttaatggatcgagtcgttggtggatcgattcagacatggacgagagccaggatggccgagttggcgtggccctggcctcgaggctccccggggcccaggtctgcagccagctggcggtgggcaggcagggggccggcgggaggcccccacccgcaccttcacccccaacccccacgtccacccccccaccccccacctccacccccaccagccgggcctggccatggctccgtggtgggtctcagggctgcatggactgtgaggccagctaggtggtggctccgtgtatcaggagtcctactctacgcacaggtcaacttccacaggcccgcgtgatgtgaggccccactgcgcgcgcaggccaacgcccactgccccacgtaatgccctactgtgcgcgcgggccaacgcccactgccccacgtgacgtgaggccctactgtgcgcacaggttaatgtccacagcccttatgtggtgtgaggctctactgtgtgtgtaggtgtgcctaccaagggaagccctcctgcatgtggggtcccctgctgggttctggggagccccgggagggccactcaccttccccgcaggtccctttggtagttttgcattatacaggctggttgtggggcagggctttgagggggttgacaggagacagggtctggggccctcaggactccccactgctgtgtcgtcgctcctgctgggccctggcctgggctggatgcacccctgcccctccaccctgtagcctccagctcctaagcaccacccactctaggtccccgtctgctcgccgtgtcccgagcttgtccttcactgttgccgtgcccactgctgacagctggccccgtccatttactctcatgtccgagaatctgaagcggtccctgacacacactagttactccgcagatgccggagggaggaggaggagaccagatctccttcctagaggaagatcctgggagtgggttttgagggctgcgtaggagtgttcccaggctgggcaggtaggtgggcagtgggcgttgcaggccgcgggcgagttgggctgggcttgggatggtgcgttgaggggcgtgtgccagtggcccctgcccgtctcgggcagaccttgggctgccattcctcctgcccggacccccagtgcaggctctgcaacagcctggagtttgaccccagttcctccgtctggacctggcctgggggctgccatgctcccaggacatcctggtggctgctgggtcccaaccccgttcgtggaggcgcctcccactcccatcgcccagtcacaggacacaccgtgtctagcgggctctgatctttacacctcatcgcagattggcttgcataatggctcagctgggttctagactttgggaatttcagcctaacccattaaacataaacgctgtgtggttacagatgctgtgtggttagagatgtttgtgctggagctgccctgactgtcggttctgagcttggagctctaattagtgcccgacggggcatctcacccaccacgggagggcaggggcgaggcgcagcagcaatgtctcggagctcccctgcccatccttgggtccagctgtgaggacagccaggcatgggtctgggagggctgtccccgcagagtggggtcggccgctcctactctcggcagcaccagggtctctgcatggaccccagctgccgtctctttctgcaggtgggcatggcaatgacctgtggctcgggctgaggaggcctggggccagtacttccccccatgctcagaggtgacgggcctgggctgctgtggggattccgagaatggaatctgggtctcaggtgaccccccaaccaaggggttccgggtttgtctgcacaggccccgggaccagccactgtagcagtgagcagggggctgatgggggtccgggggccggctgggcaccaagtctctgtgacccacaggggatgctcatgaagctcagtttatcagcccagaaaatgatggtgctgggaggggagcggggccgccccgccggggagctgcctctgtcctgcctcccctcggcccttcccccgcgtctcttcaccccaggggacggggagggggtcctaaggatgatgtggctttctgagggctgagtgtctgctacggctgctgtgaggatgttccgtggacagggtggcctgggtttggcttaggtgggggcagagtccccaggctgggaggaggcgctggaaaaggcctgggcagcctcactccctccccccaggagcttcccccaggccctccgcaccttctctgaaccctacactgaaccccaaaggtcactgacttcacaggctgccaccttcaggtgtctgtcctgggcggccctttttgtcattccactgacatttacaaaggacatctcggactctcggacccttggatttctaagtgacacaggctggatggagtttgactccaccaggggctgctgtcccccaggcctctcccagggccgatcccctccagggccgggtcccctgctgcccgggcctcagccccggctctgacatttacacactgcagccgccggcaccctcggagacagcctgaagttcagggccgagggccctcctcatggtacggtgcggggacggcgtctgaccgaggcccaccctgccgtcgccccggagtcccccaagctggcacagctagcggctcacggtcacacgtctgtcataggtttgagggctgaattctgaccggggcagagagtggaacgagctccaagtgagaaatggggtgttggggtggaagggaaggggccccccaggacaggcttgggagggggcgtcctagtgtgcttgggctgtgacagaaattctgaggacgtggtggccggggacagagggagtgtgtttctcggttctggaggctggacgtcccagggaagggctgggcaggatggggctccacgggggccacttctgggtgcagacgcctgcttctgcctgtgtcctcacctggtgggaggtggaggggtctctcggggtccttgttacaagggcattaaccccattcctgagggctccgccgctcctgacctcacctcatcccagtcacctcccaaaggccccactgggtctcagcgtctgaactccatggggacacaaactctccgtccccagcaggtgcccgggctgcgggcaccgccctttctccctgggacccccggggtctctcccgccccctctccctgaggcctcccccactccctctccctggggaccccatggtccctcccccaccccggaacccccccccccatggactctcctgccccctctccctggggcctcccccgccccctctccctggggaccccatggtcactcccccaccccggaaaccgcccccccatggactctcccgccccctctccatggggcacctcatggtccctcccggctctgcctgggatcccccaacgggctctcctgccccggctccttggatccctccatggtccctcccgccccctctttctggaccctcccccacggcctccccagccgcctcatttacgggcttcttctggtgcccccatattcatatctcagagtcctaacccacccccgagtccccatattcatatctcagagtcctaacccacccccccaagtgcctcagaatgtgactgtatttggagataagggccctttcgaagggggttaggactaggtgaggccacaggaggacacagatgcagaggggtgacagtggcgtctacaggccaaggacagcagccgcaggaggagccggccctgcccacagcatggtctcggactccagcctccaggctgtgggagagtgagcgtctgttgcttcagccgccgccatccagcagaccagcatccagccccaaaggggccacactgtccctcgggtccctccctgacccctggccaaacctggctcacccccggccaggagctcctgggcaggttgggcccagatgcccctgcccctgtctcctccaagctccagaagtcggggttggggtgaagagatgtggcggagtggccggggcaggcaggtgtggctgccagggcagaggaaggaccgaacggtggcatctccccagcagggtggccccgcgcccttgccagccccggaggaccagatggtggcatctccccagcaggctggccccgtgcccctcccagccccaccattttcctcgggataaactgaggctctgtgacctctgtcaggtcacagagaccctgttgggtggtgaatgggtgacccgtggacaccaggctgtggcgggtgtagggttcagccctccctgcacactgttactcagacctgcctgggaagcaaaaccacagcagagccacccctggctgggcctggccgtcgtctccccaggagtgagagctgtgcttttatctgacgcgcctcccgggactggtggaaggggtgtgtggcggccctgtgggtggggtttggcctcaggggctcctgggtagggtgagttgggggtccctgacctcagtcaccaggctgtggtggacggaaaccctggctgaccaggcatcggggattgggggcccccccatggactctcctgcccccgcgaggttggggaggtgggagagccgaccgagccgctgctgagtggctgttccgtcctcctcatttatttattgatgtgtgtgtgtgtcgttgttgttgctggtgtgatctcggctcaccccaatctccgcctcccgggttcaagcgattctcctgcctcagcctcctgaatagctgggattacaggcgcccgccaccatgcctggctaatttttgtattgttagtagagacgggattttatcatgttggccaggctggtcttgaactcctgacctcaagtgatccacccgcctcagcctcccaaagtgttgggatgacaggtgtgagccaccacgcccggcctcttttttttttttttttttttttgagatggagtcttgctctgtcgcccaggttggagtgcagtggcgtgatctccgctcactgcaacctctgcctcacgtgttcaagcgattctcctgcctcagcctcccacgtagctgggattacaggcatgtgccaccacgcccagctaattgttttgtatttttagtagagacggggtttcaccatcttggccaggctggtgttgaactcctgacctcatgatccacctgcctcggcctccaaaagtgctgggataacaggcgtgagccaccatgcccggcccggccttgttttttaatatacatctggttgccgggtgatactgagggggccgggctctgcaggcacagggctgaggggcgtcgtgtggatggacggccagcccgttgggtgccctggctgggtccctgtccctgcacaccgggtcagccggctcctgggtgcacaggcaggtggtgtgcgtccgcattgcagaacacggggcgttgcaggccggagctgggttttcacacagattgagaccaggcgtcgcccacagagcataatgtgaggcgagagggactcgggctgctgtgggctggggaggacggtcccatagctgggggcagagcagggcaggctgggtgaggagggggcaccccaggtgtctgaaccccaggtctgtggaggcccgaggtctgaagggaaatccccagtggtgggactggaggtgccgtggagggtgggcctgtgtcctggtgtccctggcgtccccataccccctccgaggcacagccacagtctctgggtcctgagcaggggctgcagtcacagccaggccgtgggggggccagggaggaggggctgctctccatagtgtgtcgggtggggagtggcccacctggccttggctttcccggggcaggtagggaggggcctgggcagggcggggcagggagggatgaggtgcagactggggagagtgcagggtgtgcagcgggggctgggatgccgccgaataggggcctgtggctcccacagggaggccccttaggtgaagaggaccagagtgaggtcagccctggtccacagccaccccgccctggactccccgggccagcacccgacctggccgccagcgtgctgaggacagacctgctgggccgcgttggcaggggctcaccccgtcttcccgcaggaaagcgccttggcgggactgcttccgccagcttcccggccagacccaagggtggagctccaggccacgttcccatggagggagcgcctggtcccctggggtggtctctaatttgggccacggcagctgtgcagtggcgctcaggcagttatttctggcctggagaattccagctcggagcaggccccacaggcccgtcccaggggcaggcggccgtcttccccaaggtcccctcctggctgggtttctgctgcccacgcctttcccttccaagcctgggggcccgcagcaccctcatatggggaccaagatgggcaagggtgaggccagaggagaggagctctcacccggcatggccggcccctccacctcccactccactgccaggacaaagccagcctgaccaggtggccctgaccggggacagctgccgagcccccggcaacggtgggagctgagccagcgctttgacgcccgcgtcggccaggagagtctgggggtctgctccagttccggcagaacatcctgggtggtcgtgcccccgaggtccttgccggtgtggctgcacgctgccaccaagtggctggcagggcctcaagcttcccgcaggcacggagaggagggctgggatcaggcacttttccactcaattatgccttgaaaagttcccaaatcaagctctttattagagataaataggtatattaggtctctttctaattagcatggcttttaaaattgtgcgcagttagagggagctgtccgcgtgtgctccagctccgtggtggtgctgcgagccaacctctcctttcattcctggaggtgggggacccgccctcatctcaggcctgaagagggctgtgtgtgagttctccacttgtgtgtggggtgagcccggcccatgcacacagctacacacacatcacacacccacacccggacacgcgcctcaggtccccacactgcccttacacacatgcgcccctcacacatgcatgtcccctttgcacacacgccccctcgcacacgcatgccccctcgcacacgcatgcacacaggctcactctgctgcctgtccctggctgctgtgtgcttccggccctccctgtctccccacacagatggacacaacgctccccagggtgagaagtggccgcccaggtgagcctggtgtttccccgggctgtggcaggggcaggagcagggtccgtgcctgagacagcgcaggtgatgtgattgttttggcccctccggtgggtggcaggtgggaggctctgcggggtggaggaggcgggcctcagcccacctgggtgcagcctggcggacatagaggcggaggccagggccgctctctgtggggccagagtctcccgaggccattgctcagggaggagctctgttgagatggaatgttccggcagccgggagtgagccgtccactcatgcatcagtgatttcaatcccccaggtggtggcctgtggtgggtgtgggctccccgcacccctgcgctgggggcggtgctctcccacgggcagcccagcccccgtgccctcctgtgacccgcggcgccggctggagacaaacactccatgtttggctgctgcccgggctccccacccccaactgcccgtgtgagtcacgcaagtccaggcggctggctccggccacgttcccctggccaggcccctggggagaggggctcccacatcgggggcctggctggggtgaaagctctgggcaggctgcacattgagactcagagcagactgggggttggctgggagaggccagggttgaggaccaggacagaggccaggagagctcgcagccccccgacgaggctgtcagtcactgtggcggggacccccaccctggccctcctctgacgttgcccagaccctctgttccctgcctgggatggggtgcaggtgacctctctggagctgagtcctgagtcctgggcccaacctgagagctccccaggtcaggagtcggccacagggtccatgggcactgcaggttctcaggagggcaagcccacctgtcccatctctggacaactgggtttccagggctggtacaggtacctgtgaaggaggtctgggccccacccaccacccccgcccccaccctctgtgacccgacacccccagcagcagggactggggtgggacacggtggggccccaggtggcggtttccaggaagttctgtgtcaggcatggagccctggaacccggtaccctccacccccgtgcggctgtgggaatcctggggctgccctcgggatctggcctctgggacccctgacgggttctattgcgtctgatggcgccgcgttcccccagttttcccccagcacagaggggttcttaggacctcaccccttcctgagttaaaaccctgcggtggcttctcccgaggaaggagacgggcgtgggggccgccctcagcgtggagccgggaatccctcctggcccctccccccagccctgaccgggcttcctcctcccttgtctccatggcagcggcctccggggaaggaagagaaacctccttcagtcagcgcatccccggcaaccctgatcctggatcgtgtggctgccttgccctcccccttcccacccagttccctcccgctaagaggccccgctggagaacaggacacgtgcctgtcgtggcattggggtcgggggtccgggggaggcgccgcactcagggcaggctctggagctccccgggcaccgtcccgtcctgcaggtttgatgtactttctgtcatctaccctgtgaggctggggggcggccctggggggagcgtgcaagagcacatgcgtatacacgggtgagcacgtgacctggcgtgttgctcccccagtggggtctgtcccgtcccacctgctgggagactccaaagtctgcaaacatctggctccagaatttcgccactgcagagggagactgaattaattccctcctggatcggttaattaacgacaggtgccctggagccgtgtccatgccgcctggggaaggtgcgtctgcctcggcagctgtggctgccccggtgcttcatcggatgccagggacagaagagtcaaggccagccgggctgtgcctggcccatcaggcctaggtggagctggtaggggagatgggacaccagcccattgcacagggtgtaggcgggactgctctagaccccagggcatcactcctgcccacagggggcttccggtgcttcaggaatggtcaggcccagcctgccgcatgcatggggcccctccccgagccctgagaccagggagcagaccctggccaaagcttcccctgcagcaagcactgagtccttgaaagctttgggccttactgcccgaggcagaggccagaggccggactgtggaggccggcaagcgtgggaccgaggctcaggggtgaatggggccagcagccccagaggactccaggcggcttggcctgggcacctgcacacagcagctgtcctgtctttgagaggcatccgtggggagggctcatcacctgccggcctgggctgctcgtttcccggccctcaccctcatcctctgtgagcctgggaggaggcacggatgccgcatcagcctccaggcatccctgccctctcgtaggcatccaggccccctggtggaaggcaggtctcaaggggctggagggtgccaggagttgtcacgtggccgggtgggtctggggcatgtgagggccttctgctcagcgagagtggaggccacgtggcaggaggaggagacacccccaccaacctatgcctgcccatgtgccgggtctcaattcctggtccaaagggcgccttcagtggcgactgcagacaggtgcggggctccagcgaagggaagctgccatttaaaggcaaagctgggaacgcaggctgtggtgatgactgaagtgaggttcacgtaccatgggattagccattttttttttacttgtttatgtgacgaccagcggattttaaagcgcacgggttagcgaccttcgtgttgttgaaccatcacctctgcctagttctggaatgtttccctcactccagaaggaaaccgcatccccatcagccctcgctgcccagccctggtggtctctaccccgctttgtctctgggtttgcctgtgcgggactttccgtgtgacatgtggtccttctgtgcccagttcttcccagcatcatgttcccgggttcacctgtgttgtggcgtgtggagctttcttccttttcatggctgagtaatattccagcgtgtgaccagaccacgttccgtttgttcacgggtctgttggtgaacaccagggctgtttccatcacaggccatcggggtcagtgccgctgtggacacgtgtgggcccgtctgtcgtgagtgcccgtttcctttgtccctggtgtaggcaggattggcgttcatagcctcacccaccggttatccggagcttagacgtgcccgggtggcagctggactcctggacggtgtctgtgggtcctgccagcggcagccagactcccacatggacgctgccatctgcagagtccccccccccgccgagtctgcttttctggggaaccctggagatgctcagaaagcctagtggggcacgggggtccatggcgggtgagtagacggtcagcgtgcgtaggggccggaggcggggtacgtggggggcgggcgagtagacggtcggcatgcataggggccggaggcggggtgtgtacggggcgggtgagtagacggtcggcgtgcgtaggggccggaggcggggtgtgtacgtgggcaggtgagtagacggtcggcgtgcgtaggggccggaggcggggtgtgtatggggcgggtgagtagacggtcggcgtgcgtaggggccggaggcggggctgtgtacggggcgggtgagtagacggcgtaggggccggaggcggggtgtgtacggggcgggtgagtagacggcgtaggggccggaggcggggtgtgtacggggcgggtgagtagacggcgtgcgtaggggccggaggcggggtgtgtacggggcaggtgagtagacggcgtgcgtaggggccggaggcggggtgtgtacggggcgggtgagtagacggcgtaggggccggaggcggggtgtgtacggggcaggtgagtagacggcgtgcgtaggggccggaggcggggtgtgtacggggcgggtgactagacggtcggcgtgcgtaggggccggaggcggggtgtgtgcagggccagggtgtaccgtgctggtcctcccagggctgcttggggagagcctgtttccttagtggtgttttgaataagaatgcgcggctccctcgaggtgtcccagtggggctgttcagaagctgggcccagggagccctgaaggcaggggtccagcctgccgtgaccgcacaggcccagattcctggacgtttcgctttcgtaattgcacacgcagggcctggattcgccgtgcagaaagccggacgatgccgcggcgtggggtgaacgtcaaagggtcactgtggactctgcccacgtcctgagtgccctcgtcttgtccctctccacggcgttctcatcctccggcgattccctgggaacgtctctgtacctctgcacacgtgcccacacacatgcccctcgagatggcctgcactgtggcttctgtcgtgaatgtggtcacgtgtcctccgtgactcgctcctcctgccccgtgtgccctggacctggctcggtcccgatgcccgtggcaccaccgcctcctcaacgggtggccacgtaatgcttcctggccggtgaatgtgccacggcagtggagatattctgcccttctagctcttctgtatacaagcagtgcgccctggttctcagggccgtgaccaccaccatgaccggcagacttcagggcggtccgtcccactcccgtggcctcgagggtcctttggagctgccgcggttctgagtgggggtggacacggacacagggctggttcccggggatctcctgtaccacccactgactcccagggtctgcggctggcccggcccctcctgggtctcttgatgtgggaccaaagctgttgcttcctctgcggcagaggcgatggagtccctcagagcccgcgaccgtcccctccgcactgcgggctgatagcgcctgtgggaatgggcttccccggtgaatacacataggtcgtcttcttgagcaaattggaaaagtaaggttgagcgttcctgagaatgaggggccgggaggggaggaggcggccagcgccgcgtggggccgtgggcagagcggacagggagggagcggcctcagccttggcaccctctacccagggcagggaggggtttgcccagccaggggtgggtacagagaggggagcacgtggctaagagtcctggttgcctgtgacctcagctgcagtctgtgccctgcaaggcatggggtcctgagtggggggctgtggcccaccttgctctgggcttctccttcctgctgtgggtgcctttcccgcccacacccctgcccctggctcaggccgcttgtgcccagctgttgcagatttggcctaatggggctcagctggctgagcagattgctctaggggacagcgggtggggcaggaacggcccagcctcccgatcctcccagctgcagagctctgccaccccggcactgatgtcaggatgcagccgagcagggagccctgctgggatccctggaggccacagccctgcttgggggccactctgaccatagaggaggagccaggcagcagccgcacctggagacgtccatcccttcgctgggctagcgctgctacagtcccctccctggtggtctgaggagctgaggctggcctgtggctttgatgccttaactatctcttgaggaggggcacacagccccgcctccgtccctctgtagaaacatctgtcctgaccttccttcggcaaacgtggaggtcttggtgtggtgagaacgtgtcctccagggccagcaggagccaggccgagccgtgtcagtcaggagagtagatggaggggcttgttttgcaggaaggtctgcataaaacctgtcagcgccagaaagatgaaatagcccttttgtacagatggggaagctgaggcttagaaagggggaggcacaggtggaggtagaattggggtcaggctcttgccccatggccctggcctgaggattagtcacggggcagggtcggggaggccctggccccaggatacgtgagccagcgggtctgggcggtcctgggagctgatgttacctgggatgttagctgatgtttcgggttggggttgtccaggaccaccctttgggccacgctggtcccacagcacacgggcttctgaggaacccctgtccctacccaggaccctggagaccgctggctctggggagaggggtcccacagcacctcagggctcagtcggcactgtttgggggtctggcagccccgacactggctgagccgccctgagactggctcctggccccaagaatcccaggtctccagcatcttcggcgcagagatagcagctgccagggttcccgccactcgcagacactccccctcacccagccgcgggaatgcaggccttgctgccccccacacaacagtcagtggctctggggctgcccacgcccgcgcccaggggccgggagaaaacggcgccttcagagctatgcgctttcaagctgggaagagcagtttgggagtctttttcctcctcgactacccccagatgagaaaacgggggtcagtggagcagctccactgaagctctgtgtttccggccaggaggccgcttcctcgccccctcctggatgtgtccccccacacctaaccccggccctcccagccctggtacatccaggacaggcccaggcgaggctgctgattcagcaccatggacagcagccgctgcagcactgcccgccctgcgtccacacctcctggcccgccaggggctggcatctgcggtgcactggagctgggccccttggagggcccccccaggtcctgagagctgaggggcttctgtggaccttggtgtgagccaccatggccacaggcggtgcccatgtgggaaggggagcgcttactgccgcagaaaggaggctggggggctgcctttgttccagggtcccgagggaagtggcggtgtgcaacaggaagcctgtaggggtgagaaaagctgttctcctcccggagactgaggagctggtgtccctgaagcgtcctgggcgggactggttttcttcatgggtgccagctggggaggcccagcccctggcagggcttcaggagtaggaagggggcttagcacctgcccagcccctcagaagtgcacaggcttggagatgtgaggaaggggaggtggccaggctgtgctggacctggcaggtgccctgaagagtgtcctttttttttttttttttttttttttttttttttttttgatatggggtcttgctccgtcacccagcctggagtgcagtggcacgatcgtggctcactgtagcttccacctcctggggtcaagcgatcctcccacttcagcctccccgagtagctgccaccgcaccccaaaatttaatttttttgttaaatatttgttaaatattttgtagcaatggggtctcactgtgttgcccaggctggtctcagactcctgggttccaaatgatcctcctgcctcagcctcccaaagtgctgggattatgggtgtgaaccaccgggcccagcctgagagcactgattatagagtgtggggctgagggacaggatgggtactgtgcctgaggagtatttcaacagacagggccccaccaccgagggggtcttcagccctgttcccctgttcaggcctctctctggggggttttcatcgttacgagcccctggctcgtgagcccagtccagtgggggctgcctggggaacatgtcatccaggccagactccaggggctggagaaggacaatgtggtccccacaaccttggtctgtcagaaaagaggagaatcactgaggtcctggggcttggtccagggagatgaaggagggagggtgagtgggtgcattgctgctggttgggcctcagggtctggtggaggctccctgcctgagggagaccccgtagccaagaccacctcactgcgccactgcccggcccttccctggctgggttccctgaccgttctgccgccctgcagccagcaggccccctcccagggctgttcccggctacgttggcctgcttctccgacccgcagtggaaattgattctaatttatagaagttgatttgaaatctaaaggaatttttaattaaaacccagaaaatccatctgtatgattaagcctccagaagtcaccaggctccgtgcgacacagccggcagacactgcctgtcctcagctgcccacagaagtgtgacacatgagggccagcctgctcagcccagagctgcccgagcccctgctggcctgtgcgggatgtgggacctcggctgactgctcccctctctaggcagagccccaggggggcactgggacctggtacatctggcagtccctctccagggcagggagggctggtggctggggtgtgacccggttgggaggcgcgcaatacgcctgcctgtcacgtcctctgtcgtgagaggcctccttggggccccccagaccctgctataccaccgtcccctccagagctgccccacaggcacaggggtggggtccttgccattggaggagctctctgggattgtggggctaattttgggtgggtgctgggggaaggggaggcagaggatctacgatgggtaggggccctgcagacccaagagctgggacccgtcaggctggcctggctgtgtggcctcaggcacactcggggtctctctgacccagcaggctggcctggctgtgtggcctcaggcacactcggggtttcgctgacccagcatgctggcctggttgtgtggcctcaggcacactcggggtttcggtgacccagcaggctgccctggctgtgtggcctcaggcacactcggggtctctgacccagcaggctggcctggctgtgtggcctcaggcacactcggggtctctctgactcagcaggctggcctggctgtgtggcctcaggcacactcggggtctctctgactcagcaggctggcctggctgtgtggcctcaggcacactcggggtctctcttactcagcaggctggcctggctgtgtggcctcaggcacactcggggtctctgacccagcaggctggcctggctgtgtggcctcaggcacactcggggtctctcttactcagcaggctggcctggctgtgtggcctccggcacactcggggtctctgacccagcaggctggcctggctgtgtggcctcaggcacactcggggtttcggtgacccagcaggctggcctggctgtgtggcctcaggcacactcagggttttggtgacccagcaggctggcctggctgtgtggcctcaggcacacttggggtctctgacccagtaggctggcctggctgtgtggcctcaggcacactcggggtctctgacccagcaggctggcctggctgtgtggcctcaggcacactcggggtttcggtgacccagcaggctggcctggttgtgtggcctcaggcacactcagggttttggtgacccagcaggctggcctggctgtgtggcctcaggcacactcggggtctctgacccagtaggctggcctggctgtgtggcctcaggcacactcggggtctctgacccagcaggctggcctggctgtgtggcctcaggcacactcggggtttcggtgacccagcaggctggcctggttgtgtggcctcaggcacactcagggttttggtgacccagcaggctggcctggctgtgtgacctcaggcacactcggggtctctgcgagccgtcacctgtgcagcaccgcaggtccgggagatttggggttccattgtcgccaggcttagctcgggaggccgtctgcagctggcgtgcctgcaggcccaaccttgcccctctatggtcttctgctgtgtgtgtgattttggcggagggggatgcacctggatgggaggggctcactggagccacacccctgcttggaaaagacagcaccccatcccccactaaaccagacggtccgagaggtcggggaggggcacccaggccccctcctggcttccctcgctgccagtcacaaaggcttggggtgggtctcagtggcatggcagagggggcaaaggtgtccaggtaggaccctggcctggggacccctagtcagctgtctttgaggagttgctaggcactgggtgccacccacccctgccagcccctctgccgtgggcagctttcatggtgactggcactgatgggccctgggctctgacaccatccactccactctgctggctggacagtcttagagatggctggtcaggggtgctggccccttcccttctgtccccattgggccctccgcctcagggtctgggccgggtccagaagtcagcattcccctcagtgccaggaaggccatgccgtagctttagctcaaagtcctgagctggctagggtggcaggaactgccagggtcaggcaagtggctgggggccagctggggtacagggagggtgtgaaaggccttgtgtccaggtagccccctagcctagggcaccctctgctccagcctggacatttctggggggtctccggggtgatctgagagcaaacatggggcaggcctgggagaaatcgggcaatggctggagacatctggaggcgggtctcagccctcagtcctggagtccaggggtggctggaaattgcctgctttggtagtggaatgtgtgtgtgctggttgggagccggcccaacttgaaggagagtgtggagagaggagacagaaaggcggtccgaggcacccacaggacaagcagtcccaccaccccccattgggtagatgggtaaactgaggcctgggatgccctgtgcccagggagaggcagtgccacctacaagacccctggctcagccaggctggggtagagtgccgtgggggctcaggtcagggagcaccgttccccacacctgcctgctgtgtcctgtttgggccgggtgtctttgagctcctccccgccagcctgttccgtttacccaagaaaacccctcccctcgggaaatgatggccctcagagatgcacaaagacagtccccagccacccccgcagaaaggtgctatttgcggcagttaggggacaaaggtgcccgaggctgggggcggagccgccatccaccatcgctcccttgcactagtgccgggtcaggaggctgggagaggccaaggggcctggcacggcttccacagcagggcctcggctcctgcccccaccaccttgaccaaggcacgcaaaccccacccccacctcgtccagcaaggactgtgctctgaggcttgccgtgaaggcgctcacacactctggccgctggggtcgcagtgggtgcgtcatcggtaggcggcagtgcgtgctgtggccttgcccacctatgggacagcgcgtggctgtgccagcatgccagctgccttggcgggaggctgatttcggctttcttgcagcagtgttacagcagaggcgcctgttaccgctgaacccattaagtgtaattaccgcactcttggtgggaatatgtaattacattggtggcctggagccgtggcactggcatcaaatgctgacctgctaggaggctgggccctggcttggtgggagggagggttccaggatgagctgctggggtccctgggggaggggctccaggctggagtgacaggtgggggcagggaaggccctcgtcaccaagcctgttcccctcctaccgtggcagctgcccttcctgtgatccctgagagtttgagacactcagaccctgaccccagtgctgcacgcagcacccaggacctccgctgtagtgagcgtggcccgtgttgggcagggggcgctgctgccaccatcatccgggtcccaagcaggcctgccaggggtgagggggagccgtgggcgctgaggcctgtggtctgcgccaggtgggtgctgggaagggcggcccccgagagtcaagcacaggcccaagtccagagccaggggtgggggcggccaccgggctgcccctgaatcagctgtgagaggatgcccagctctgtctcctcctcggttcccacgtgttggtgacggcagggactgtcagagctggtgcctgacttcccaaggctgttcgctgacaagttggtgctttccaaatgccggcttctaccttaaggaaggtccctcctgggtccacagtcagctgacggattgcctctccctccttcctctggttccctggtcagggtggggccgcgcagccctgggacaggggccctggaaagtctgccccgagttgtgccaccgtccaggcctggagggtgggacggggagtcctgtccggtgggttgcatggcggtgccccgacattccccctgccctggggccctcccagttgcacagggtgccctgcctacagccccccagcgcgggagccctatgcaacctgggccccatgtgggcagctaggccctgggagtctgagtggccctcactggggcctcactaccgatgcggccagcccaccgagggctcctgcaccccgctttcctgatgagccaacgccgagggccagggggccgggcctgggaccctcacggagcagagcccggccaggcgcaggccccaggcgccacctggtggctgctttcaggaggggcggccgtcggtcccgagtcccccaccccatcctggacacccccacgcgcgcacacccgtggcggggctccggctgaccgggtgggcatttggagggccccatgggagcgggtcccgggccgcgccggtgtgctccttaacccgcggcgacacatggttcgagcacgtgagcatgctggtaatcatgctcaactgcgtgaccctgggcatgttccggccctgtgaggacgttgagtgcggctccgagcgctgcaacatcctggaggtgaggggcgtgggtcggggtggggaaggagcgtgggtcgctacgaggtttatggttcaaggcggagtggggcgggggcggggcaaggttcaaggtggggcgtggagtgggtcagggtcggggatcagggcgaggttcacggcggggcgcgaggtggggctgggggtggggcagggcgagaggcgaggttcaaggcgaggcagggctcagttcctggggctcagggcggggcaggggcggggcgaggggtgtggcaagactgggggccgggctcttgcggggctggggttgggggttgtgggctgagctgagctgttccacgggccctcctgatgcctcctcccgcaggcctttgacgccttcattttcgccttttttgcggtggagatggtcatcaagatggtggccttggggctgttcgggcagaagtgttacctgggtgacacgtggaacaggctggatttcttcatcgtcgtggcggggtaggccccgcctgggagaggccacagcgctggcgaaggggccccgcccaccccacagggatccctgtgtcccacctgtaaagaaaaatgggaggtgtgttctagagggatccaggtagagccagggaccctgtctgggactccggagaccctccctcctgggcacaggtgagggaggtggcctcctgatgtgaccaagcgttgtgctcctgctacctcggggcccttcctggccagtacaaggtcctccgggtgccgggctggccggttctatgcctgcccaccctactttgcaccccagccccaccctggaccacctgggctccttgttgagctgctccccctcggccccgcccccagcatgatggagtactcgttggacggacacaacgtgagcctctcggctatcaggaccgtgcgggtgctgcggcccctccgcgccatcaaccgcgtgcctagtaagtgaccggccccgactgggcttgagatcaacaggcttgcgtgtccgccagccctgcagagctctcaaaagggcccccaggagcacaggactgggaaatgaaggttaccaggcactccggccccagcccagaccccagcagtggggtggcccctgccgctatccgtgggccttgcatgtcaggggagaatcaagctgcggtgtggtgggcagtcagcattcacagggtacctggctcccacacagccgagtgacaggggccactccgaacctccggttccttctctgcatggcatctggggcaaggctggaggccgagcagatccctggtggctttgctgtctggcgcatcctggtgtggctcgtggtggagacactcttgtgggtgtggctcagctcacctgggggctctgtgaagccccgccttcacacccacacaagtgaggggagagcctgacacctgtcctgaggacacctcgctctccccacccgccactgcttctggcccctactctcctgccaggatccccacctaaggaaaggggaagttggctggccagggctgggcctccgtgtcccctgctgagcagctgattttctagaaggaaggctggaaatccttcaggatttggccagcaggtgtgaggagggggcctggtggagaggagctgctgtgtgtctgctgtgcgctgggtgtgaggggaggcggaggaagagcttccaggaagtcatatgcctgcttgtttgggaaacatcctgtcaaatccgggccacccacctgcatcaggggatggggtgggatcgttctttaagcactcagggctacattcaactgctctggttcctgggggtcggcgcggcccccacgaggccgtaccaggcgcgagtgcatactgcgtgtagatgtggccccgtgtgtgcacgtgcgggtgtaacacagcctttctggctgcctgacctgggtcctggtggccttggcactcagggcttgacctgcagcaaccccccaaagtcacagacccccaaggctaggcactccttcccatggggcctctggcttcccgaagggcaggtgggtcatcctcgtgccgctggtccctgagcctgccttccacctgcctgccttggctctactgtgtggctcagatagggcttgaatactgtgtgactctgagcaactagctgagcctgaacctcagtttctcctggaatagtgcagtacaggagtaaccatgaccccaagggtggctgagcgtgcggtgaggggacgcgtgtgtggctcttggccctttgcccggcacccactgtacgttcagtctgcacgccggcctggccccacctgttgaagcgtgaagcaacccagcacacacagccccttccttccatggatgtttacttttcaggttaaattgccagagtggccctaattgtcgccagcagcctggcctcctggggatctgctcctgtctctaggagagaactagggaactcttccagactggataatacgcttctcataatgaggacacgctcagggctgcatcctgttctgttggctaggggtccactctgacctctgggtcatctgtgatctttgaggcggttgcggtctggccagggcagtgctcactgattgtctgctccggtcggctcttttgacacttcagtgctcctcctggctctgactcacccttgtgacctgaggggcccgttttgccattgatacccctgggtgctgggtgagaactcagcgtccccaggttcctggcccagggctttacctgctgccttagcctggcccttgattaaatttgagggaaaggacgtcttgggggagcaggcccaggatggagcgaggggcgcgtggggcttggctgacccacttgctggattaatctggagttcacgtagcccatagcacccaggaccgatggcttcagtgctacctcctgaaaagccgctgccggtcctccccaccgcctccagcagcctctctctgagatggggctctgttctggcaggattctcactgggaatcagacaaagttttcaggatcccagacctgctgcagagacccccaggaggcagcccaccacctgaggttctggggctcccaaggctcctgctgccttggtggcaacttcagggtgtcgccagacaagcctcgagggccactgggctccgcctggtcatcccgagcccgagatgccacgtggtcagacctgccgcagccagttccctgcctcggccagtcccctgcctccactcctgcccctccacaccccagccctccaaaagcagcagacctgctgccctgggatggttggaggtggagacctggcgccccgctggatgcacgtcagaccccagggtgtcagtgtccctggaggccggtggtggtaggaggggagtcccgatcacactaggggtgcgggaaaatcaccagggggtggcccgagtcagtgtgcagtgggcgtggacacccactgtgaacagtggacggggctcgggggtcccgggaggggctgcagccccgaggacactcctgcagggcttagcagtgccaatcctggccctgctgcccacaggcatgcggatcctggtcactctgctgctggatacgctgcccatgctcgggaacgtccttctgctgtgcttcttcgtcttcttcattttcggcatcgttggcgtccagctctgggctggcctcctgcggaaccgctgcttcctggacagtgcctttgtcaggtgcccaggccccacccccgtgaggcccctgcccagatggccctgcccaccatgcagataacgcaccatgtggctccaccgccccacgtggctctgcccaccgtgcagtcacccgccccgccactgctgtccccgtcatggctccgtccaccatgctgtctcccgcccccaccccccatcatggctccgcccagctggcagtcaccgccccacatggctccgcccacggtgcagtcgctgcacatatgccccaccccccaccatggctccgcccaccgcgcagtcgctgcacatatgccccaccccccaccatggctctgcccaccacgcagtcgctgcacatatgccccacccccatcatggctccgcccaccgtgcggtcgctgcacatatgccccacccccatcatggctccacccaccgtgcggtcgctgcacatatgccccacccccatcatggctccgcccaccgtgcagtcgctgcacatatgccccaccccccaccatggctccgcccaccgcgcagtcgctgcacatatgccccacccccatcatggctccgcccaccgtgcggtcgctgcacatatgccccacccccatcatggctccgcccacggtgcggtcgctgcacatatgccccacccccatcatggctccgcccaccgtgcggtcgctgcatatatgccccacccccatcatggctccacccaccgtgcggtcattgcacatatgtcccacccccagtgctgccacctctcagcccccaagacaggttagtcccaacacttcatcccctccccacaccccagagtccgtcacaccttaccccagggtctcccctcggcccttgctctgcagtctctcctcagccctcaccccggggtcccctcaaccctcaccccgggttctcccctcaattctcacccccgagtctcccctcagccttcaccccagggtcccctgagcccacaccccggggttccctgccctcagccctcacccctggatcctctcagccctcaccccagggctgcctcctttccctcaccccaggcttccctcccctcgtcccttgccctttgcccctcatccgcttccaggagttgctgaggtctgagcctgggtttctggctcttgggtctccctccctgtttgtctgtgctgttctttgttgatttctctgtccatccctgttctttgtgtgtttgtctctgtggacttgggctgaggagagtgtggtttctgcagcaccactgtgttcttgaccctggtcctggctgtgtcccctgatccgggtcttgaccctcagtcctatcatgccccctgaccctaaccgtgcctccctaaccatgattagtccactggccctgaccctgatcacgtccctgaccttgatcacgtccctgatcacaatcgtgcccccgactctgaccgtccctgaccctgattgtaccttttggccctggctgtgcccatccccaggaacaacaacctgaccttcctgcggccgtactaccagacggaggagggcgaggagaacccgttcatctgctcctcacgccgagacaacggcatgcagaagtgctcgcacatccccggccgccgcgagctgcgcatgccctgcaccctgggctgggaggcctacacgcagccgcaggccgagggggtgggcgctgcacgcaacgcctgcatcaactggaaccagtactacaacgtgtgccgctcgggtgactccaacccccacaacggtgccatcaacttcgacaacatcggctacgcctggattgccatcttccaggtgggcggcaagatggtgggacggggaccctggggcacggcaggggagcgggtgcaggactcgccccccccagcccagaccccaggggcacggggaggaggaggaggggtcgtgcgggcccaagtcaagccactgcccccccaggtgatcacgctggaaggctgggtggacatcatgtactacgtcatggacgcccactcattctacaacttcatctatttcatcctgctcatcatcgtgagtgtgggcggcagtgttcgccatgatgggccctggtgttagctggctgggggtggggtggggtacctgggtggtcataggggctcctgtctgtcttccagctgaagggagcacacaggggagggaggcagagcttgcgggggtggggaggtgtggctggggaccccaagaggccatggcatcacctagacagggtccaggcctgtgggtgctggctcagggctgaagagccaggaacaccctggggagtgcatagcctcccagcaccgctttccacgggcgtgtgtggccccaggtgtgctccttagctggtcctctcataggccccagtgggtcctggcagagttgggttaatcaggccgcagacgtctgtggggtcctaggtatacctagagccaccctgcggggacctagtaggtaacagaagcagacagacgtccccagcttgttctgagagagcaagcgaagcgaacgattagagacttgctgcacgctggtccatgctaaggaggaaacgcacctggggtgctggggaggggagagtggccaccgttgagagggtcatctcaaggccagatctgcaggtaaaggaggggccgagccacatggagaagcaggaaagagggttccaggtcttttgtccagataggcacaaagcagctactgtatgccgtctgctccagacgtgggggctcagcactgaacaccgcagcagcctgcccatagcagggcacctcgcccactgtgcctgtgacgcggcccccactcgaacaggcagcgcacagtagggctcagtggcgaatcagagactcgctcactcactgccacttacccgcccgcccccgtcacaggtgggctccttcttcatgatcaacctgtgcctggtggtgattgccacgcagttctcggagacgaagcagcgggagagtcagctgatgcgggagcagcgggcacgccacctgtccaacgacagcacgctggccagcttctccgagcctggcagctgctacgaagagctgctgaagtacgtgggccacatattccgcaaggtcaagcggcgcagcttgcgcctctacgcccgctggcagagccgctggcgcaagaaggtggaccccagtgctgtgcaaggccagggtcccgggcaccgccagcgccgggcaggcaggcacacagcctcggtgcaccacctggtctaccaccaccatcaccaccaccaccaccactaccatttcagccatggcagcccccgcaggcccggccccgagccaggcgcctgcgacaccaggctggtccgagctggcgcgcccccctcgccaccttccccaggccgcggaccccccgacgcagagtctgtgcacagcatctaccatgccgactgccacatagaggggccgcaggagagggcccgggtggcacatgccgcagccactgccgctgccagcctcagactggccacagggctgggcaccatgaactaccccacgatcctgccctcaggggtgggcagcggcaaaggcagcaccagccccggacccaaggggaagtgggccggtggaccgccaggcaccggggggcacggcccgttgagcttgaacagccctgatccctacgagaagatcccgcatgtggtcggggagcatggtgaggacccagccccaccccacggaggaggcggtgggacctaggcagggcgggcagggtctccggtgtgtcattcccacacccattgtgggcactctgatgagcccagctttgacttgtgaaacagaccagctatgcctctggagcccataagaaggggaaagaggcaggtcccgcccctgacagcgccaaagcaagctcccggtggcccacagctcatggcaggagtggtagccgcggaggtgggattttgaatctgacaaggcttgtcagaccctcctggggcagcatcccattgcccctgcctggccccgagagggaccgtatgcttgtgtccacagcctggacgcttccctggaggacgtgcagcgtccttcgtggccattgaggctggccccccttctaggtggggacgctgagtgggggagtgtgggggaggcaccgtcgcagagtcaccgagagtcaggaagagaggctggcgtggggttctcctatgcggggcctgggcctctgtccaccaggtgaatgggagactccagggcccccagatggtagggttccacacgggcctgggggcccttcctggttctgtacacagatgtagagacgcaggcgggggtgtgtcccccgtggtggggagaggtgcgagcgagggtgccgagggtgccgggatgctgtgtgccctcatgcgctggtacccagggcgtgcagacgagtgtcgggcgcatgctcctagcccttgaattgtgggagtccagccgctgtgtgttataagaggcacacgggctccaaagacagcacgaaaacatcacaggacggctcgatggtcattttcatgtcagtttcgtgttggagtaaccatggtttgctcgcatcgagtcaaacagaatcccgtagctaacttcgcctgtgtgctgtggctgctgggaagtggctgctgttatatttctgtggatggcacagcccaaggcaggcaaacgtctctgcacctaagtgtgtccctgccccagtacgtgagcaggaatgcggctgtgggggttgggtgtgtgtgcccaggtgtgtgcccaaatgtatggtttttctgatgtttgtggctgctgtacccacgaactagtgggtttagaacagcggaaaatcactcagctctggaggccagtgctccaaaatccaggccttgcagggttgcttcctctggaggctctaggggagaactctcctcgcctctcctaagttctggcggttttgcaagtccccggcttgtcgacacgtccctgcggtctctctgtcttcacatggctctttggtttcttcttattggaacagtcgtggctcagggccctccctactccgggatagcttcattcctcattgtaacccatgacacctgcaaagatcctgctttctgtgaagtccagtcacaggttctggaggttggactctggatggatctttctgggggggacacattcaccccaccgctcctgtgtgtgagggttcccgggcccttgtggcagcaccactgagtgggcctgcccctgtctgtgccctctcccgcaggactgggccaggcccctggccatctgtcgggcctcagtgtgccctgccccctgcccagccccccagcgggcacactgacctgtgagctgaagagctgcccgtactgcacccgtgccctggaggacccggagggtgagctcagcggctcggaaagtggagactcagatggccgtggcgtctatgaattcacgcaggacgtccggcacggtgaccgctgggaccccacgcgaccaccccgtgcgacggacacaccaggcccaggcccaggcagcccccagcggcgggcacagcagagggcagccccgggcgagccaggctggatgggccgcctctgggttaccttcagcggcaagctgcgccgcatcgtggacagcaagtacttcagccgtggcatcatgatggccatccttgtcaacacgctgagcatgggcgtggagtaccatgagcaggtgcgggctggcctggccacggggtgggctccctgtcaggcttgcagggcctggggagtctcaggaggcttccagcagccccgatgcctgacctgatggtaggacggtcaggcagggctctagaaagccggggatggtgaggataggagaccaggtgtgccgagcctccactggaggggatctccttggattcctggcctcctctctagacggcagctgattaggctccttttgagatgctgctgcagccctcttgaccctttgggtcttgatgcagccaaacctgctcccagatcagtgccggggaggggtgggagccgtgggtggggccccagatcagtgccggggaggggtgggagccgcgggtggggccccagatcagtgccggggaggggtgggagccgcgggtgggggcccagatcagtgccggggaggggtgggagccgcgggtggggccccagatcagtgccggggaggggtgggagccgcgggtgggggccccgatcagtgccggggaggggtgggagccgcgggtggggccccagatcagtgccggggaggggtgggagccacgggtgggggccccagatcagtgccggtgaggggtgggagccgcgggtgcggcctcctgaactgtccccacctctgcctgcagcccgaggagctgactaatgctctggagatcagcaacatcgtgttcaccagcatgtttgccctggagatgctgctgaagctgctggcctgcggccctctgggctacatccggaacccgtacaacatcttcgacggcatcatcgtggtcatcaggtgggtccccaccctctccccaggaagaggggcccgggaagctccactctctggcagaaatcccacctgcagagcaaaacccagagcacaggaggaagtacgacgatagctctttatgacaggccgtgggaagcaggtgcttggtgaccccagtggcccaagggaccgtcctgggcagagtcccctccccagacgctatgcttccctgcaggcactacggggtgcgcacctgttaggtcagctgcgtctcagatgtttctagaaactagcggagctgtttcctgcaggaacaaagcaggtgtggggtggcctcagggccgagcgagaaagaccagcttaaaaggctgaatcctgcttgctgctggaggagcatttgctacaagaaaattaaaccagaaaggattgggaaaatttgaggggaaacgcccccggtcttcccctaggaggacgctcatccctcaagagtagagaggggtgcagggtctcccatcctggggcggggagggagtgagcagaacggacaagccaggtctggctgtggaaggcccaggataggagagcgccctcggcgaaggagcttccctgccctggccagagccaggcttctttcccagggggcactgggggccgggtagcccccggggccatcagcggataagcggcttttgaggtgcttccgcagctgttcatgcaccttgatgcagccataccctctcccatctgtgggatgcagcacaggccgctgtggctccctggctggtgaccctgcttccagtgggacgagggcctggggtcagggatcgtggccccgctgaccctcgcccccacctgtccgcagcgtctgggagatcgtggggcaggcggacggtggcttgtctgtgctgcgcaccttccggctgctgcgtgtgctgaagctggtgcgctttctgccagccctgcggcgccagctcgtggtgctggtgaagaccatggacaacgtggctaccttctgcacgctgctcatgctcttcattttcatcttcaggtgggcgcaacccccctcccggcccgcccagtgtctcaccccagggcagctgggaggcaaaggcccagggcaccccccgaaggagaaggagccctcccaccagcagccccagagcatctgcagacactcggcctctgctgccttcatttgagaagcactgattgggcccctactgtgtgccacgtgttagacatgcagggagtcagatggcaggggtcagagatgggccgccaggtggacaagctggggatttactcaagagcagaataccgggggtgggggcaggcaccaggctccaactggggtgttctgagcgcctgctgtgtgcccgtctagcctggagctcagggtcagggtcggctggaggctaggcagccaggcaggccgggctttcacagtccagagaggctgaatgaggcaggtgtcccaggttccagttgccacccaaatccagagtggcttccctctgtctgtcccgcctctggtcttggttctctcgcctgtggaatggacactactgagttgtagggcaggaagtcccttttaagctagagagctcgggcgcccagggagggtaggaggccaggagagccaagacgggcagagccagtcctgcccctccctcctcccacccccctcccgctcccccaccttcttccgctcagcacacccctgcctccaccctcaacacgcccctgcccccaccctcagcatcctgggcatgcaccttttcggctgcaagttcagcctgaagacagacaccggagacaccgtgcctgacaggaagaacttcgactccctgctgtgggccatcgtcaccgtgttccaggtagtgcccggggtccccgcagcagtgttgggtgctgagtgtggtccccagagaggtggaggtgccgtcctgcgcatccatagctgcctctgccccaaggacttgccggcatttcggggctggggtgaccaccccaggccccctgctatcccccagatcctgacccaggaggactggaacgtggtcctgtacaacggcatggcctccacctcctcctgggccgccctctacttcgtggccctcatgaccttcggcaactatgtgctcttcaacctgctggtggccatcctcgtggagggcttccaggcggaggtgagggggcagggagaggggctgccaggaggagggcgatgagaagagagacgggcttcaggtcgaggggaggggtgtggggggcctgccaagaggtgagggatagagaagggaagctggctgccatgaggagaggggaggccaggagcccagcggagtgggcaggggtcggtcgggagaggcagattcctcacctacctgcccaccctggcagtgacatcatcctctgggcccttctgtccacaccccacctcccaggccagcccagacttctgtccggcatgaagggtccccactcacggggcccctcatgcctgccttgtgctttgttgggtttagggcgatgccaacagatccgacacggacgaggacaagacgtcggtccacttcgaggaggacttccacaagctcagagaactccagaccacaggtgcgtgtggtcggtgggtggtccgggttctggcgggtggagtacgctgggctggccgggcagggcccccataaggcaatccctaggttgggggattcctggtcctgggagcctggcagctctaggggcccattcctccctctgtcccgcagagctgaagatgtgttccctggccgtgacccccaacgggcacctggagggacgaggcagcctgtcccctcccctcatcatgtgcacagctgccacgcccatgcctacccccaagagctcaccattcctggatgcagcccccagcctcccagactctcggcgtggcagcagcagctccggggacccgccactgggagaccagaagcctccggtagggaccatctcctgccccagctctcaggccccttcaggttttccctgcctggctccttatggccttccctgaagatgagtgagggccgcaccccccacacccttgaagtcccagcctgtgcagagactgagaaagagtgttctggtttccggaaatggaagctgtggctgctgttgtgtgaggccggtgtgaaggggcagacgcggaagctctgtgcgcccaacagtctagcagagtgcacagcgcacagcacagaaagaccgaagcaagcaggggcagaagcgtgcccggcaagcagacggcaggccaggcgggggttccgctgccaccagaagcagcccgattccctttacggccagggcatctctctgggtccagggggactggaggggagcagttttgaaacgaactccaggcagtaccacccacaacagacacggaggatgggagtgagccagacgccctagcaggggaggaagcggggcagctgtgaggcagagccgcaggcccagtgtgctcctggggacacgggggccacccacactttgtctggtcctgggctggttctggcccctgacccagcagagcccagggcatcacccccgcgaggcggacaccctgaccctcatgagctacgcctgtggctggctcggtgtccccctaaaatcacagcctccaccgtgcctccctggcggggctatgcattaaatgatccacgtgtggcttgcacacagtgggtgctccgtaatgacagcggtcggtgctaatagtgatgccaccaggtcactgactcccgccaccccccaggccagcctccgaagttctccctgtgccccctggggccccagtggcgcctggagcagccggcgctccagctggagcagcctgggccgtgcccccagcctcaagcgccgcggccagtgtggggaacgtgagtccctgctgtctggcgagggcaagggcagcaccgacgacgaagctgaggacggcagggccgcgcccgggccccgtgccaccccactgcggcgggccgagtccctggacccacggcccctgcggccggccgccctcccgcctaccaagtgccgcgatcgcgacgggcaggtggtggccctgcccagcgacttcttcctgcgcatcgacagccaccgtgaggatgcagccgagcttgacgacgactcggaggacgtgagtgcgtggccctgggcccaccgccgactcgccttcgtctgtctggggcaggttccctcaagtggggtttgagatgggattcagggcgtgttgttgactgaggggattcagaaggggagagaagcaggccaggccagggaggaatccagcagtgttcagggattcagccacagatgatcccagagtcccccctctgccgtctaggggctgtgagctaaacgctccacgcacggcctgcatacgggggctgggctctgcgccgtgggtcagccactggccgagagctgctgccgaggcagggccaggcatccgctaggctctcaggcttccgtgggtcaaggaccactcccagagtcagggacccaagagcacccgctcacctggccccgtggactccagcacgggtcactctgccgtcaccagcgtagggaagggggaggctccacggtatgggccccagaggccagaaagccagagcccaaaggccagcgggtgaggagtgaggatggagaaggctgagaaggtgctgggaggggtggccgagctgagcacagagggccctgatggggggccgggcaggcaggcgcaggctctgagaagccgccgcctcatcccacagagctgctgcctccgcctgcataaagtgctggagccctacaagccccagtggtgccggagccgcgaggcctgggccctctacctcttctccccacagaaccggtgaggcggccgggtcaggaggctgcatggctagttccaccccacgggacccccgcccccaggtccctcctgggtggggctagcacatggtggatatttccgagtgggcaccccttctcacaccgcagggaccggggctgaagtggaggcgtggccagggctgtcctgcaacccccatccactctgccatccacgccgccccgccccacctctcacccgcccccgcccacccaggttccgcgtctcctgccagaaggtcatcacacacaagatgtttgatcacgtggtcctcgtcttcatcttcctcaactgcgtcaccatcgccctggagaggcctgacattgatcccggcagcaccgtgagtcagccaaccccatcgtcccgggccaccacgacccccagggaggggtggagtggacacagccccccaccgtcctctcccggcaggagcgggtcttcctcagcgtctccaattacatcttcacggccatcttcgtggcggagatgatggtgaaggtaccgcggggcccggggactgcccttgttcccaggtccccgttctgccctcatccccacccccacccagcagcgcgccagctccccagaccccccacgcctgagcctgagctcagtgccattggccctccgcaggtggtggccctggggctgctgtccggcgagcacgcctacctgcagagcagctggaacctgctggatgggctgctggtgctggtgtccctggtggacattgtcgtggccatggcctcggctggtggcgccaagatcctgggtgttctgcgcgtgctgcgtctgctgcggaccctgcggcctctgaggtggggggctccccgtgggctcccggggcaacctggaagcacagtcccctgacgccactgcccattactcctcccgcagtcctgggctgttcgcaggccgcccactcggccccaccttgggacctttgctgagctctgccggcgcctggcagctgctgccatagatgactgcagtgtatccttcactcccctccagggtcatcagccgggccccgggcctcaagctggtggtggagacgctgatatcatcactcaggcccattgggaacatcgtcctcatctgctgcgccttcttcatcatttttggcattttgggtgtgcaggtgtgtggcccccacgtgcccgggggtctgccccgtcgcagacagggtctgccttcccagcgtggctcccagcagcgccgctgcgggacggggagggacagctcgggcctcactcgcgccccaggaagtccggtgtggggtggggcacaggccaggccctccgcggtgaccgtcgcaccccgtcagctcttcaaagggaagttctactactgcgagggccccgacaccaggaacatctccaccaaggcacagtgccgggccgcccactaccgctgggtgcgacgcaagtacaacttcgacaacctgggccaggtgggctgggcggccgggcgggagctgggggtctccaggacaccctggagcgagagggccggcgaccccagctctaaccctcgccagtgaccctggctctggccctcaggccctgatgtcgctgttcgtgctgtcatccaaggatggatgggtgaacatcatgtacgacgggctggatgccgtgggtgtcgaccagcaggtgcgcacaggcgggtcgagctgggtcacctcagggtctcccgcgagcggctgccttggcctctggggactcggggggccatcctgggtagggcccctggcggggcaggcgggcggggacccaccgcctctgtgccacagcctgtgcagaaccacaacccctggatgctgctgtacttcatctccttcctgctcatcgtcagcttcttcgtgctcaacatgttcgtgggcgtcgtggtcgagaacttccacaagtgccggcagcaccaggaggcggaggaggcgcggcggcgagaggagaagcggctgcggcgcctagagaggaggcgcaggagtaaggcgctcccggtggcggtggcggtggcgggtcggtacctgtgtgcccaccgggccctccagcccctccactcccgccccggcctccccgaatggctctgcacgccacccgccttgcctgggcctgcatgggggctgggccttggaggggctggcccgagagggccgtcggggagcccgccatggcaggagaggaggagacacccccaaccccatccccagcgcccaagaggcaggttccccaccgagtcctcactccacgaggagccagcacagcccccgagacacgggggctgagggagagcagggagggctccaggcccgagtgcgccacgccctcggccctcagaccatctccttgtctttccaggcactttccccagcccaggtaccggccctgtcccgcatgcctcaggccccgcttctgcggccgctgctcggggaagggcgggcatcccaggcctgctggggtcctccgcagggtgggcacaggcagccggaggtgctgggcgtgtggcgtgaggaggggctgcgctcgcccgccagtgtccgggctgctgtgtgcgtgcacgcgtgcggctctgcccggctcacagtctgcctgcatctccgccgtgcgccgggacacccagagcaacgaggggccgcccacacccctgcaggcttgtggctgtcctgtgtccttgctggtccagcctgactggccgcgggccctctccggctgcccgggctgcgctgagtgcttcagtgactgcatgccggccgcagagcatgagggtcgggtggcgggtggatcctgctcttccaggccctgggccagcagtccccacccgtgtgtggttctgtggccgaggcaggtcctggggtgtggtggcagctcacgccttcacccgcgggagctcctcctcgtacgtggaggggccctggaggctgagcattcagtgcacacctgcctgggggacacacgcagatggcgggcgccgacttcagatggtctggagtccggcagaccctagaccacagcccatggccccttggaggatggggaggggaggtacttgggctggtggccagaggagggcaggttacactctcgtctctgctccagtgaggccttgtgggcccagacccagagatggagtggggctgccctgcccagcccttcatcagtgtctcagcctgaggccaggcaaggagtagaccacagaggcccagccacgtgctgcgccaacttgggagctccaggggggcgggccctgccaggcacccagttgggatgtgggggagccatctcagcttcatacccactcctgggggctgcctggcgcaaccgcgttgctgaggaggaggttagtcagtggcctgccccgaaggcctgctccagcccaggcctcctggcctagccagctccccagggagctgcatctcacctagaacagggtccttttcctgagagagtcccccttctccagtcttatgtgagccctgccatgaggcagggccagccccatcttcacatgagccgtgggcccccaacttctaccctacacttggccacctaggaggagaatggagtctgcaggagccaggagcgccgggcggccctcctgcccggcgctcatggccgccctccccgcagaggcccagcgccggccctactatgccgactactcgcccacgcgccgctccattcactcgctgtgcaccagccactatctcgacctcttcatcaccttcatcatctgtgtcaacgtcatcaccatgtccatggagcactataaccaacccaaggtgggtgcgagggggccgcgaggggcccaggggctggggcacccccagtggggcagccaacacagtgggcacaaccctggaccggcgctccgctgagccctcgctggggtttgcgtggggatgtggggttttgtgtgaacacgggtcttttaatgttgattgaaactcccctccccctgtccttggggcccctccccaacctggccgtgagtgtcccacccaaggaggggctggcgggaggtgagtgtcccacccaaggaggggctggcaggacgtgagcatccgacccatggggaggggcgggagccaggcaggcctgaggtggagtttttctttattcgggtccccctgcatcctctcctttcctcagcggaaggacttcgtcctcccagccttttagaagaaggaggtagcctctgggtagcagtaagcttttgaggctgaacagactcagctctatggaaagcgttttgtgtggagccgaggatggccgtggccagaggccaggagcctgggctgggaggggcaggatcttccctctccggaggttcgtcctcagagggtgaggggctcccaggtccatctgggcagtacctcccagcccagcccaggctgcataccgtcggtgctcagagttgggccctgtgagcccatgtccccatgtccccgaggtgctcaagtcagtagaagacagggtgggaggtcaggacactgccatcggggtgcacagacggctgcagggtgtgaaatgggctgggggctcagggtggcttcctggagacagtggcattcagctggtcttgtggatgctgggagggtacctttcactcattcacctgatcagacacttacggagcacttcctgtatgctgggctggaggagggccgaagaggctcccggtgcccagggaggagctactgagctgacctgggagcctccagggccggccagcgggggcactcgggcgtgcagagtgggagccagggggaagaggggtggccccagccccacctcagccagcccgaccctccacccccagtcgctggacgaggccctcaagtactgcaactacgtcttcaccatcgtgtttgtcttcgaggctgcactgaagctggtagcatttgggttccgtcggttcttcaaggacaggtgtgtgtggtggggccgtcttgggttctgggggcccctcagggctctgggggctgggggcaggtgaggccgcaggctttcccacggaggtctgcagaagcaacgctgctgagccgaggcggggaccccagacgtgtgcgctgagcctccggccacacaggtggaaccagctggacctggccatcgtgctgctgtcactcatgggcatcacgctggaggagatagagatgagcgccgcgctgcccatcaaccccaccatcatccgcatcatgcgcgtgcttcgcattgcccgtggtaggtgcccgcgtgcccgccaggttctctctgcgggtggagggtgggggctcagccatgggtgggagtgaggggcggggcggccagggtccccgcgcagcagggagggtccgcccagccctgctgacgctcagctcccggccctagtgctgaagctgctgaagatggctacgggcatgcgcgccctgctggacactgtggtgcaagctctcccccaggtaggtggagcccgcgccatcctcagcgcaggcccccggaagacggggttgcagggagcgcctcgccgtccccctctccccctcactcgtttctctggtccctcggttgtgtggtggctgaagctgcgtccctgctgtgtgcagtgcatggcttggctgggctggcagaggtggatccagccgctgccctctggcctcaatcctctgggcaagactcataaccggggccccctccccggtgcacttccagaggcgggggccgtggagagccagagggatgcaggcagagggcagcaggtggccaaggtgggtgtgtgtgggcacaggaatacacccaggatgcaggcgtcggctgcgggcccggggccccctcggagcccacatgggcccagcctccctgcttcctgtgcccctggcccctgcccagatcctttctgtcctccaaggccaagagacccaacacgttgtcccgtccgtagcctctagtccacctatccaacccccgtgtgtccgtccatccaccagcccagccatgttcccagccacccccaacccccacggctgcctatgcacccggcacctcctcctgttcccacccatttcctgtccctgcgccatctgtcacttgccccctgcctgtcttctgcctcccacctcagctgtccccactcaccctgtcctcagcggcgtgcctagcttcgtccaagtaacactcccgagggccaggtaccactccaccaggtgctcagctgtgcagagaaggggcgtggcgtaggacaggcctggccagccttggagggtgcgccgcccagcggggcagtgtgtgcaaatgctggggctggtgggtggctcacaagagagccgtggcaggggaggggtgaggcccaggcccacctgccgggacccctcagtcagctgcgtgctggcctgggccccgccatgggatctctgaggtagccgctgaacagggcgggccagagcccccaggaagagcatgctaggccttggggaacctgctgggcagagtgtggagtgggctctgggccagaggctgatgctcaggggcagggcagaggaagagagaagccagtgcgggccagcacagaggggtgggctctgtctacctggtgaggtcatggtgccccgagaggggcatggggctgaggaacaggggtccccgcccagctctgggaacttgcttccacttggccgggcccggagcacctggaagaaggtgggcaggtggggtctggtggccgaggcgccgagtgccctgcagggtgggctgaggcctccctgcccgcccgtctgacccagctctgcttctctcttgtgtaggtggggaacctgggccttcttttcatgctcctgttttttatctatgctgcgctgggagtggagctgttcgggaggctgggtgagtggctcctgcgccctcctcctggcacacatggggtcctgacaggcgcccctgtgcccatccactcacacgcaggcacatgcttgcaaatagcgtggggcctgatcagggccacacgcctcctgggcgtcctcacccggccctgcttccggagccttttctgcacgaggccgagtctcgtgttgacgcagaggcatgtgcccaggcttgtgacacgtgtgcggacgtgcacacagcaacacagacacagggatgcctgccacacgtgaggggaagcaagaacacctagagacgtgcacacacagacatctggaaacacacgccatgcccaacgtcacatggtcccaggagacaaatgttggctgtctccccttacctggtggccgtagcctcctgaggcccccacccaggcctcagcctcggcccaggctgggcggggcaggtggggaccctccttagacggcccagccctgcccctgccgggttccacttcaggcagcccagtccctgcagggccctcccccgggccctgtcccgacggtgggtgtggcgttgccacagtccagtgtctgtccaccaggtaagcttgattttggtcagccggcgcctactcatcccccgccacgcgcagtcacagacacacacaataatgattcttccatggcagccgccaggcctgatgagccccagcccaggtgcggcagcaggggcctcggcccaggggctccgacctcacacccagggtcaccctctgccaggcagggcgaaccgccagggcctcgtcatccacatcctccgggctatcctgcctctgggctccccaaggggcatgtggaggctgggtgcatgtcccgcctccacccggagcgggctcggctgaccgggcggggtctccctccccgcagagtgcagtgaagacaacccctgcgagggcctgagcaggcacgccaccttcagcaacttcggcatggccttcctcacgctgttccgcgtgtccacgggggacaactggaacgggatcatgaaggtacccgccgcggccatgcctctggcacctggcagccccagcggtttttcaggctctcccaggaacgggtcggatccgtccttgcagggcagggggaaggggacggcactgccagggtggcacccgcgggtgggtgtggaccccggcccacagctgtcccccaccgcaggacacgctgcgcgagtgctcccgtgaggacaagcactgcctgagctacctgccggccctgtcgcccgtctacttcgtgaccttcgtgctggtggcccagttcgtgctggtgaacgtggtggtggccgtgctcatgaagcacctggaggagagcaacaaggaggcacgggaggatgcggagctggacgccgagatcgagctggagatggcgcagggccccgggagtgcacgccgggtggacgcggacaggcctcccttgccccaggagagtccgggcgccagggacgccccaaacctggttgcacgcaaggtgtccgtgtccaggatgctctcgctgcccaacgacagctacatgttcaggcccgtggtgcctgcctcggcgccccacccccgcccgctgcaggaggtggagatggagacctatggggccggcacccccttgggtatggtagccagcaggaagatatgggctgggtgggaagcaggacagggaggaagatgggggcaggtgggagggaggatggggtcaggccagagcagggcaagaggaaggatgggcgggaaggaggatgggggcaggcaggagggaggatggaggccagattgaggaggctgggtgtgggcaggtgagagagaggacgggtcgggctggggctggccaggaaggaggatggtggcaggttgggggaggacgggggtgggtggcagctgggcaggaaggcaggggcagagctgccagcttagattcttccctgccccaggctccgttgcctctgtgcactctccgcccgcagagtcctgtgcctccctccagatcccattggctgtgtcgtccccagccaggagcggcgagcccctccacgccctgtcccctcggggcacagcccgctcccccagtctcagccggctgctctgcagacaggtaggagaagccgttggcctgcagcagaggctggcggggatggggggcttgcagggatgcctcgtctcatctgaaggaccagcagacgaggacaaggcaggaggagggtcgcactgggtccttggggctccgaaggtttctgcctgctgcttggtggatcttggagcattgggcccaggtgcgtcttcaggcctgtgagcctgtggctacagagctcttggctacagggacctgagtcttcttggacccacagcttcaggccccacggtgggcagacagcggtttctcaggtcccgtggtgggcagacagcagtttcccagggcccacggcgggcagatggcagtttctcaggccccatgtgggcatgggtcccgtggtgggcagacagcggctttttcagtcctggcttgtgttcagatgtcccagccttgcccacctgcagcctcagctcctcttcctgccctttcctacctcttgctgcccagtacaagacgcctgtaccgcacaggagcagttaggagagccccatcctgggggtgcccagctgggctgctgatgtccaggggtggggaggtggcctcagcctcagctctgtgcccctgggggccatggcatctctgcccacagagcagcgggtacaggctttccccgggagcctcacaggtcaggagtgagactaggacgtccacaccagcggcttccagccccatctcgagggtcaggagccacccaggggacctgcccagtttggcctctccagtacctggatggtgaggggtctccgagccctggccactgacagggctctcccagggccccgcccctcactttgactctacgcccccacaggaggctgtgcacaccgattccttggaagggaagattgacagccctagggacaccctggatcctgcagagcctggtgagaaaaccccggtgaggccggtgacccaggggggctccctgcagtccccaccacgctccccacggcccgccagcgtccgcactcgtaagcataccttcggacagcgctgcgtctccagccggccggcggccccaggcggagaggaggccgaggcctcggacccagccgacgaggaggtcagccacatcaccagctccgcctgcccctggcagcccacagccgagccccatggccccgaagcctctccggtggccggcggcgagcgggacctgcgcaggctctacagcgtggatgctcagggcttcctggacaagccgggccgggcagacgagcagtggcggccctcggcggagctgggcagcggggagcctggggaggcgaaggcctggggccctgaggccgagcccgctctgggtgcgcgcagaaagaagaagatgagccccccctgcatctcggtggaaccccctgcggaggacgagggctctgcgcggccctccgcggcagagggcggcagcaccacactgaggcgcaggaccccgtcctgtgaggccacgcctcacagggactccctggagcccacagagggctcaggcgccgggggggaccctgcagccaagggggagcgctggggccaggcctcctgccgggctgagcacctgaccgtccccagctttgcctttgagccgctggacctcggggtccccagtggagaccctttcttggacggtagccacagtgtgaccccagaatccagagcttcctcttcaggggccatagtgcccctggaacccccagaatcagagcctcccatgcccgtcggtgaccccccagagaagaggcgggggctgtacctcacagtcccccagtgtcctctggagaaaccagggtccccctcagccacccctgccccagggggtggtgcagatgaccccgtgtagctcggggcttggtgccgcccacggctttggccctggggtctgggggccccgctggggtggaggcccaggcagaaccctgcatggaccctgacttgggtcccgtcgtgagcagaaaggcccggggaggatgacggcccaggccctggttctctgcccagcgaagcaggagtagctgccgggccccacgagcctccgtccgttctggttcgggtttctccgagttttgctaccagccgaggctgtgcgggcaactgggtcagcctcccgtcaggagagaagccgcgtctgtgggacgaagaccgggcacccgccagagaggggaaggtaccaggttgcgtcctttcaggccccgcgttgttacaggacactcgctgggggccctgtgcccttgccggcggcaggttgcagccaccgcggcccaatgtcaccttcactcacagtctgagttcttgtccgcctgtcacgccctcaccaccctccccttccagccaccaccctttccgttccgctcgggccttcccagaagcgtcctgtgactctgggagaggtgacacctcactaaggggccgaccccatggagtaacgcgcccggccccgatgcgaatcaggcctcccctacatctgggggcgttggccgcgagattcccattgacacctttgtttcgtgtgcttttaaattcaggttaaatgttgcaataatctgatgcagaagactcagcttctcaagggagagggagggggcggagcggaataaatagtaacttatttaagaaatgcacttggattcctgccatcagtcaggggcggggaagggagtaccatccgcagatgggtgcagcaggcacttggccagcaggacacaggagactagcagaaggaagaggccggggaggaagaagccagccaggagggggagcctggggtacccagactctgagccccctgatgctgtgatgtggcggcggatccagttcacgtaggcagggacacgagtgtagactcccggcctgttggggcggccgcagccctcaccccagctcacagtgccagcctgcacccaggcaccgttcacctggcagaccagaggccccccggagtcgtcctgaggacagagaaggcgagcattgggagccgagaagatggggagcccctccctgggcttcagccgcccccatcctctgtcacggcctggcaggctcacctggcaggcatccccggggccccgggcacacagcatgtcgggctgaaggatgctgcccccggggccgggatagtcccggcggcaggtctctgtgtccaccacggagactttcacctcccgcaggctgtacgggggtggcagaggctctggggtggggggaacaggcttcagagaaggttggggcaccaggccctgcactggggggatgggagaccttgccagacacaagtcccatgccaccacgaccctcgtcacggcacgtgggttgtgatctgacgtttggctgctgctttggatccacacgacaggctttgaaaagggacagccgataggggcggccttggctgggtgtggaagccaccaggagcaggtggtagcatcagcatccctcaagccagctctcttcctgccgcccttgccttcctccatcccagcatccccacgggggctcctcacctccctcccgcgtatagccccagccggtcacccagcaccggatcccagggcagaagtcatctgaggcctccgggaggcagacgggcaggatccggctggagagggtcacggggacactgagctccaccagggcgatgtccccgctggtccccggctgtcctgaggggctggagtgcaggatgatctgcctcacggtggagaagtggggagacagagtgatctccagttcccccaggtgcacctggtagtcggatgagttcagggacctgggagggaaggtggctgggtgagaggggccagctgcggaggctggaggtcagtgtcggccccgcccagaccctacccttgcaggcatccgaagcccagctcttccctcctaggcttgggacgcagaaagcctgggcagtggcctcaccctgcagggcccaaggaccacggcagcaccttggggttcctgccagcccctggaaaagccagcagcatgcccgacaccagcaggggctggtcaggaggcagattgcaagctcagctccacgtgaagagaccgaggggagggaaggagggagggagctgtccatccctagaggtgagcaaagagctgcagaacctcacagaaggtgg

SEQ ID NO: 76 - DNA, 121982 bp, Homo sapiens
  source 1..121982: mol_type = genomic DNA
ttgttctcttggcctcagtttcttcacctgccaaatgggcataatagtcctcctgaggttgttgtgagcatcagacaaggccagggagtagaagtgctttgagttggagtcggagccagcaagatgatttgcatcacctagaacaaaatgaaaatgtgggacctcttgataagcaattaagaatttcatgttggtgacagaagaattctaaagcaagttcagggcccttctgagcacggggccctgtgcagctgcctgagccacagacccaggaagcgggctctgaccggaattcttttttttttttttttttggtgacagagtcttgctctgttgcccaggctggaatgcagtggtgtgatcttggctcactgcaacctccacctcccgggttcaagtgattctcatgcctcagcttcccgagtagctgagattacagcgtgtgccaccacacccagctaatttttgtatttttagtacagatgaggtctcactatgttggccaggttggcctcaaactcctgacctcaggtgatccacccaccttggcctcccaaagtgctgggattacaggtgtgagtcacgtgcctggcctttgactggaattctatttctgctgttactctgctacatgtctgtcctgtcccttctctgggcctcggtttcttcatctgtaaggcaaggaggttagactctaagattcctgggttctcagccttgtaaggcagtggctgggaggtccctgggtcaagggctcagctgtaggtctcagctcaggggttacttcctcagggaagccaactgtgattccctcctggcttgccagcgttcccccagtctctgattctgcagcaccccaacattgcctttgtaacctgcattgtcctggcaataatgtctgtctttacaatcacctcttttttcttgcaagttttctttacctttgatggtgcaataaatacatagctctagtcttgtaaaaaagttaagatcccttccttccttccttccttccttccttccttccttcctttcttccctccctccctccctctctccctctctccctcccttccgtctttcttttctgtctataattacttaaacattttttctcttaaataatgaaagatttcaaatacagaaaattgccaatagacaaaaaaaaaagagttaatatcacaattatattctaagaaggctttattctccccactatcttcgtttgccaaaactgaggctcagccagggtgagcagacttgccccatgatcacccagcttggaagcagattccaagttgggtgcagctgggccctcagctgtttcgtaatcctcatgcaagagtgagggtgaggggcctgtggggctcaggtggggctgtcagagctgcatccgtccacttattggtggagaggcaggttggggagcatgtaccaggcctgtccccaccacgtgccaccctctctgtcttccccagggctcccagctcagtgtggacatggctgagagcgcctccccgccctcctcatctgcagcagccccagccgctgagccaggagtcaccacggagcagcccggaccccggagccccccatcctccccgccaggcctggaggagcctctggatggagctgatcctcatgtcccacacccagacctggcgcctattgccttcttctgcctgcgacagaccaccagcccccggaactggtgcatcaagatggtgtgcaacccatatcctccgcagcctcggctgatcggggccctgcaggggctgaagggtggggggctggattgagtcctgctgctcacaccttgctccggctgggagacctgaggtctgcggtgaggccactgggccttggtggtggtgagcgagctcagagggtgggtctggggagacctcaaatggatgaggacctggtgttctgctgatgtgaaggttctggaagttgctggtggctgtggggtcagtccagtggctggctggctcagaaagtccttgagtgtgggccccagacctgtgctgggctgggaatgcagatcagtcagactctggagccacctgatgggccgtgaccatacagaggatgggagccgtgatcaggaactgtgggcgtgggcagcggggcagccgatcccaacacacagggcaggactcattctccttactgtgcctccgagcagcctcttcccaggcctcctgcctccacttgctgcctccagtgggctcatgttccccctgcttaagactgtcatgatttgctatggtcctggaggtgcagagcaaagtcctaatccaacccatcagggcctgtgtgttccacccagcctcacttcccaccacttggcttcccccctgtgctcttctgagcctcagggtcctctcactggctcttccccctgtctgaaaagcttttcccttccccctggacctggccaaatcctttgctacatccttaaaatcccagcttaagcatcacctcctcagggaagccctctgggattcctcctctgcttcatatctaactgtcacatctaactgtggaattctgaatctaacatttgcctcccctggggtactgtcagatgactgggatggggaccctagcacctggcacagtgcttggcacatcgtgggtgctctggcagtgtttgctgggtgtacatgggcaatgccagagctgactcctcaataaggaagagcgttggttgggtagagagggtagtgggaggcaggaggagggcatggcaggagcgaagcctggagaagggaggagttgcaggcagtgttggagccctgaggggcagagaggagtgaggtgaggctgcaggtgtggcgggagccctgcagggccttggaggctgcatgagggatgggactgtgctccaagggcaggatttgaagcagggtctggagagatctgtgctctggaaggactgtgtggcactggcttgcagggtgaagtgggggctggggaccactgaggaggaggcttggggacccaagccatggtggccttgtggtttgagggtcccaccaaaaaatgcccatatgtggctcgaggttctggtgcttgtggccacacagggcagggtgcggggagctggtgggtcaggtgcaggcctgagtcctgccctggaatccagggatgccagatgcaggctgggatgttgagactggctgcaggactgccaggcttcccttctgtagggggctgaggtgatcgtgggccctggatccccctaacttttggaaaccagcgggtctctgctggagtgggatgcagaactgggtgttccttgctgggtgggggctaagagcctccctgctccttctgggggacggctcacagcgtctcaggcttggtgagagggtctgctcggtaattagttcacccagcactcactgacatctgccctgggacactgaggacaaagaggcagagctggtgtctgtcccagggagtgcccggggaagagggaagcagggaccacccatttggctagtttttttttttagatggagtctcgctctgtcacccaggctggagtgcagtggcgcgatctcggctcactgcaacctccgcctcccaggttcaagcaattctcctgcctcagcctcccgagtagctgggactacaggcacccaccgccatgccctactaatttttgtatttttagtagagatggggtttcaccatgttggtcaggctggtctcgaactcctgactcgtgaaccgcctgcctcggcctcccaaagtgctgggattacaggtgtgagccactgtgcccagcctacgtggctagttttaatacaaagcactggggaaacctcaggggcttgtggcatgtgaacagaggagtgccaggcctgagaagggggcggccgcaggaattttgggcctttaggaagagaaaggctggtaggaggaccagggggacaatttcacaatgtctcaggggcctttcctgggtgagatgacaagagttgattctggctctgtcacttgggtgctgtgtgaccatgagtaagtcactttgcttctttgaaccttagggggtctggatgggcaatactgctctgggctggaggcaggggcatggctcagaggacttggcctgggagtctgacccagctgcgtctctgatgggctctggctgggctggctggggtgctgcccacgtgtcacggagaggcccctagatgggggtggtcaagtcctgtctgccatgtgtgtgaccctgggcagtctcctctctctgagcctcagcacctccacctaaaaaggagacggcagacgaatcaccccttccagccctgggagcccagggtgttagccacacacgccatgggggctgccttgatctcaggcaccctgacgcctgaccactgagtgagccagcccctgggaacccacccagttttccatatttctggcctgttgggcaaacagagtccttggggccactgtctccttggttttcaccacccctctcacctccatcctcaggtcatgtgggttgtggcctggggttggagacaacagtggggctggcccaggagggagaggagtactggtttcgggaggagctgggcctgcctcttgtctgtcttggagagagccctgggtccaaggggtggggcagaaagcagcccccctccatcaggagggacttttcagtcccgggagctgcgcagagcgagggttcccccggcatccccatggccagggctgctgaggctggactgggatagaggtggttcaggtctcggccttaactggtgggatacggactctcttcaggccagagatgtggcgactcaaaagcacagcaactttaaaggtgtcagctctgggacactcagactgaaaacttctgcgacagtctaagggttcaaagttaagatttaaggctcagcgacactgaaattctaagcttctgtcattcaaaggctgcaaaattctgtgtttcaaagagtgtgtgagcctaagacttggtggctgtgatgctgtgtgcctacgagttggaggattctggacccggtggctgcagccgctgctggcctgagagttcatagctgaattgggtcaggtgggagaggggccaaggagggttccacaaacagagacccaggagacgtggctgtccatagggctgtcccctggagcagagactcagtcgtggggagctcagggtgggctttaggggcttgggatggggtgcgtgtgtgggtggggcaggggctgaagcctctaggattctttcctggctggaaacttcactccctcttgtgctctgtgggagggggcctggggcagtgcttaagcttgtactcctcaatgggacaccattggcatttgggggttgacggtgctttgtagtcttgtctgtcttgcatattcaatagtagtagtgtccttcaatcattgtgactaccataaatgacctttcacatgtctagaccctgcaaagggcgactctttcccccactgagaacccaaaggggtggtgggtgcgtagcatcagagtcaggctggtgggagctgctgtcatgatggccaggcccgggaaggggagggcagcatgggagggtcccccagacagcctgtcctgagctcatgtcctggtgctgaggggccctggcccagagccagctgctctttgaagcctggtgctccctgactcagctcctcttccagcccggagctaggccctgagtcaccgcctgactcactggagagccagcaggctgctgggacccttgtggagcctgcaaggtggggtgggaaagggccactcgcccatatgtcagcaccgctccctgcctggcctgggccgtgggcatgggctgtcagctgcagatgcagctgcaaggcctctggattcgaaatgtcaggggatacattgtgctacttgaatcacggggaggtggcgtgtggcaccgtggaaagcgctgggcacctgaatcacacagacccagaggctggttctgtctcttgctgtgtgaccatgggtcagtttcttaacatttccgagccccagtttccccacctgtcaaacacgggtggtaatacccactccacagggttgattgcactgaggacagagcaggacagtgtgacagtggagtttgggaactggaaaagccaccatatgtgtggttatcactctgattacctgtgcctgaaccctgaacagggccctcacgtactgctgagtcaacactctgcttgctgtagattcaattagacattggggacaggtctttagatagaacataacaccttcagaggacattgtttccaaggaacatcagacccaatctctgttaacttaggtggatttgagcttgttctgctgctagtggccatgccccccatcagtgcagacattgctaatcgagcctgccggcattctccagcagggcacctctggcagctatggggagccatcagcctgaaacctattattattttccaccctagattagactttcagagcctttctttcttttctttcattttttttttttgagacagagtctctctctgtcacccaggatggagtgcaatggcatgatcttggctcactgcaacctctgcctcctgggttcaagtgattctcccacctcagcctcctgagtagctggaattacagaagcgcaccaccatgccgggctaattttgaatttttaataagagatggggtttcaccatttcagccaggctggtcttgaactcctgacctcaagtgatctgcccgcctcggcctcccaaagtgctgggattacaggggtgagccaatgtgcctggccttcagagcctttcttaggagcatagctggctgcatatgagtgaagggccagagtgggttgcactcacttccttttccccctctctgagcctcagttttcttatctctttaatgggttgattaaagatgattagcgatggttcctgtaaagcacccagcggtgtgtccagcacaaaaatgtgcaggatgagagctgatgctgattgctgaaagcattttgtcagctttaaccctcataaccacccgtggggataggggctctcatagccccattttacagatgaggaaagtgaagctcaaagaggttgagtcacttttatccagggttgcacagccaggctgtggcggagctggcatcaaaaccccgatttctgtgcctccccagtcctggcttttattcaggacaacattgccacctgcagagtctggagaaacaccaggttctccacactccaccagggcagagaggagcttcccgtttccaggcagtggggcagtggcgcttctgctgtggtgggaagcagtgatgcatagtgcggaagccagtcggctgtgaaggccgcctctctgctcgggaaaggggagggcgccagcctgcggggaggcaggagaggccagctgcccaataaccctttgcgccctcgtctccctgtctgtgggatggggaaagttgggcaccaggtctggaaggggctgtccagggcacccatttcccggccgccctcctcgtgggtgggcccccgcctctgtgccttcgtgttcctggttctctcctgaccgcgccttgcccctctgccgacttctgtctgcttctgctcccctgtctggctccagctctctgcctgccagtgctggggtctggatgtctgtgcttcttcttcttcttctttttttttgagaccaagtctcgcactgtcgcccaggctggagtgcagtggtgcgatctcggctcactgcaaccttcgcctcccagtttcaagttattctcctgcctcagcctcctgagtagctgggattacaggcactcaccaccacacccagctaatttttgtgtttttagtagagacgtggtttcaccagcctcctgagtagctggaattacagaagcgcaccaccatgccgggctaatttttgaatttttaataagagacggggtttcaccattttagccaggctggtcttgaactcctgacttcaggtaatctgcgcagctcggcctcccaaagtgctgggattacaggcgggagccactgcgtccagccaatgtctgtgcttctaagcggccatctggttctgcccatgcacctggtggagacccctgcctctcgcatccactggtttcatctggcactgggcaagaagaggccagggcgcccggtctcctcatggcccctcgaagcccagtcttgtgctgcgcgtgacgagggttgaggctgtcgaaggaggggatggctcgtgttcatccattgttctcccagtcattagtacatccaccgagcatttcctgagtgtgagctgtgaacctggactgcgcggagcacagctctggtctttttgtacaggaggaaaactgctctggctgtgcagccaggagacccgtcgagaggcgcctgtgggacgatggcgagaaacgacggtggaccagcgtgccggctgagggcctggagagggggcttggtgcagccctggctcctttagggttggcgttaggagatggagactcagaggtgaccccagggtcggtggcttggttgccaggtgaaggaagatctgctcctggcttcttagaccagtggccttggccaagttccttgcccttgctgagcgtctgtttgctcatctgtgaaatgggggccacagtgacccccagttggggatattaagggggatccaatgagaattctggggcaagcatggacaaactaagtgctgagtggcagctgtgtgtacactggagctgacggagtcgctgacagggtcctgagcctgcaatgggcggagacgcctagggcttggccagggtgggaaattgttggctcctggaggtgggagggcgggaaggtggggagtggggcctggagagctgtaagtgtgttgggagaggaatggcgccatctctgcagaagacctcctcccatcgcctgctgtccctgccctggtcacttagcccctgcccctgcctctgagcaggccacctctcagttctgctccagacagggcctcaggcctctggataaaggcctctgggactctctgggagctctgaactattaggaagtcctcccttaatctaatctccatcctccctgcccccagtcctttctggtggggctactgggagtgtctggggttgggttcttccatctcttcttgtctacacaggcagctcctgggaccttgccccacgtgacgactggtaccaccctccctcctcctcccctgctctgcagagagagcactgggccaggtacccaaaaccgtgtgaccttggcagtcacctctcccctgggctccccctctcctccccagttcgccttcctccttgggggtttgtctgctgtcaagtgctgtgtacccggaggggctgctgtcccagccctgctccactgctccctgcctcccttcatttgtgtgctgattctttcctcactccccgtagctcctgggaatcggctaactgagcctggactcgaggtctccaccatctgcctattatcctccagccctattcttcccgttctttcccttggggtccagtgctctgttttgaagccccagccagctgctgaggcttcccagcctttcccctcctctgcctttgctcctgctgggcaccacctgtgatgcccttccccatcgccgtggttctcaaccccaccagccccacaagcccaacttccaggcaccatcggcaggaagtcttcccttttcctcactagcctcctcagccctacgtgggccctgcccttctgtcctcccagtagttgtttgctgctagctttgtcccctgcactgggctatgacaccctggaagacagggcttacgcctctgacgttaccatgtctccaatgcccagcacaggcctggcgctgccaagcttcaggcactctccagttcacagagctcttccccacctaccatgacccatcagactctctgagcactcctaagagggtacagggcagcgagtgccaactctccaaccatggctggggagactgaggcccgggaagggagcatgccatgcctagggccacacactgagtcatcagcaaagccagagaaggcaagctcaggacccagactgtcaggtaagagccatccctaccctagcccgcttatggctggctgtatctgtctgtttgcattgctgtgtaagaatacccgagggtgggtagtttataaagaagagaggtttatttggctcatggttctgcaggctgtacaagaagtgtgatgccagcatctgtttctggtcaggacctcaggaagcttttactcatggtggaagggcaaaggggagaaggtgtgttgcatggagagagagggagtggtgcaaggctctttcaagctctttttttttttttttgagacagagtttcgctcttgtcacccaggctggagtgccatggcgcgatctctgctcactgcaacctctgccttccagattcaagcgattctcctgcctcagcctcctgagtagctgggattacaggcgcccaccaccatgcctggctaagttttttgtatttttagtagagatggggttttgccatgttgggcaagctggtctggaacttctgacctcaagcgatccaccagcctcggcctcccaaagtgctgggattacaggtctgagccaccatgcccagcctcttttaagctcttttaaacaaccagctcttacatgaactaatagagaactcacttgttatccaggggaggacactgagcccctcaggagagatccaccccatgacccaaacacctccctctaggctccacctccagcattggggatcatgtttcacaggagatttggaggagacacacatcaaagccatatctctggggaaggggctctttagagggggaggtgtcccttccgccttcagtcctggcctaatgggctgtccagacgggaggccagcattactggaagcagcaacacatgtctgggaaattgtccgtttccctccaactgctgtggagaaagttgtttttctcagaaataaaagtcagcctcaggcaccattcccagggatgctcagccgggccagagcggaggctgcactttcactgaccagcagggtgggcccagcaggcattggaggagcctgacccccagggcaacctcaggtaccctggcatggaggttttcgtgtaaagagaactgcaaggctgtccctgatccaacctgggggcactggtgaagcctgcctaggggaggggctattcagcctgggtcttgctgtataaataggaattttccagaacagttcagggagggttttccaggcagagggaacacggtagggcacagggaggggtttagtgaggctggaaccatgtggggcaggggctggatggcagggtgtcaaatgccaggttagagcttacacttggtcttgtgggccacgggtgggtgtctagcaggggtgggacttgggcaaattcacttattagaatggtgactcccaaagcagactggaggatgcttgagggaaagactgaggcatagaaaccaggtaagaggcccctacaatggataccgatggatggattgatcacccattcattcgacaagtgttggagcccagctatgtgttggacactggtctgggcttgagtggaggcgcccccaggcctgttcagccatgtcatgtgggaccgcagtacaccaggcctgggcacccggtggtgaccctaaggagtccccagcctgatggaggaggcagagccacacccgaatcacactcttgtgaaggaaagtggagcctaggctgggtagagggaacctctggggggcatgagtgacaggagaacagggcagccagcttgttctgagtggggatgccacaggagcctcctcccatgaagaaggaagcctcagagctagggcaggagagagcgggaggggagaagtggggaggcagagaagtgggatggggcatggcctcctggctgaggaagcagcctgatcaagggctcagagctgagtttagggtcaccaggttgctaatagcctggtgtgtgggctgggagaggatgtgcatgaggatggaaggacatttggggtccagattctggagggcagaacggaagactgcgaggggaggcaccggtgtggatgaggggccttttgtatgctgggtgccgttcctgctcccagcagctgagccggccctgagtcacccgtttgacagagaggcgaagtgcctgtcctgggccacccagcctggtgggggcttggatgggagacctgatgggatgggaagtctcataattgaaggagaactagaaagcaagctggccggctgttgaagggccagcccctgccagggaatttaagacatgattggatttttactggtccatcctacctgggcttctgccctgctgcctccctcaaactgcctcatggtcccattgagagacaaatagcctcatttattttccttggagagaaatcaataagtctttttaatcagccaggatgtcttctgctaatctgtctccagctctcctgtaggaccacctttcacatttctatcctcatctgccgagtggagccatgctttgctctctagtcttcctcttcttccccaagttcaaatcctgacaccggtgcttatcctgtgtgatgctgagcaagctatctggcctctctgagtgcacttccaagcaggaggagaaggcttggttggctgagatgtgctgtgcgaatgtgaaggcttgttgtgcagagccgtgggaagagggccgaggtggaggtggacagagcagggggtgctgaggactatacctggcttttcccagtggagcagtgggggaggctcccagccccacacacatgtcacagtgaaaggatgattatggattgactctccccaaggtacagtttgggcttcaccaagtacaagcttgacctcaggcaagtaacccctcctctctgggtctcagtttccttatccataaaattggggtggggtgggctatatcagtggttttcaatcggggtgactttgcctgccaggggacacttcataatgtctggagatggttttggttgctccaacgtggggaggatgtgctactggtttctagtgggtaaaggccaagtacactacagtgcacaggatagaggatagagtcccacagcaaagaattatccagccccagtgacaaagaattattcagtggcactcagtctgaaaaacccagcccaggcagtctctgagatctcttgaagctctgaaagtgtagaacagtatggagtcgagggccttggagggagggcaccaagactgagagtggggatccctgaaggaggaggaggagatggtacagtcacatagacttggattagaaccctggagctaacatttactgaaatgtcacattcccaactaccttcccatactcccactcacccatcttcccccatacacccccccacccatctttcccccatacacccacccacccatctttcccccatacactcactcacccatctttactccccacccacccttctttgcttcatcactccatccgttcatccaaccatccatctatccatccatccatccattaatctatctaaccatccattcatccatctaaccatccatccatccaagcatccaactatccatccatccaacaatccatccatccctccatccatccacccacccatccatccatctgtctttccatccaagcacccaaccatccatccatccatccatccatccatccatccatccatccatccatccaacaatccgtccattcatccatccaactgtccatccatgcatgcatccatctctccatccatccatccagccatccatgcatgcatccatctctccatccatccatctatccaacaatccatccatccatccatccaacaatccatccatccatccatccattcattcatcaatccaactgtccatccattcacccttccaaccctccaaccactcatccattcaaccaaccatacattcatctatccaaccatccatccatccagccaaccatccaaccatctatccatccatccatccatccatccatccatccattcatccacccatttagccatccatccatctatccatccatccacccgcccacccatccatccagccattcatccatttacctatctttccatctcttcatgcattcgtctgcttatccacccatccctccactcaacctttacattcatgcatttatccacacatcttcctaacaattacttatttaatcaacattgaccccactacccaaaaccctatttacacaaccatcaatccatccactcatctatccattcatttgtttggcagatgcttgttgattatccttccacatttctcatccattctactgtctgctgaatgcccagaaaaaacccatattgggcacgatcactcatcctttgaaccactcacaaggccttttgtatctggcttattctcctcaccttctgctggactatgagctccttgaagatgggttccatgttccaagagtgcctgtttcttccctagaccttggccactggccctgcacatagtaggtgtgcagcacagcttttgatgaagtgcatcctggcaggcaaggttggaggtagaggttgtatggcctgagatgaggctggagggagaccaagagtgctgtcacagagggccttgtatgccaagccaaggactttggaaagaaggcagtggggagccacagaaggcttttggttttgaaagggctctctggctgccatggaggtgggggatgtatcagaggatatgaggctacaggagaaggctgttcaggaaggagagaatgcagcctgcctggggcaatggggcattgaggagtgggcagaaaggaagggtttaggtggtgaaatggacagatctccgagatagatgtggggcgaggggaagggaggttccagagagttctagtctggaaaacttccaggactggtgatgggggtgcatccttcatggaggtgggacatgctgggggagaatttagtggtctgggaagaatatgatacatctcttctggacgtgatgaatctgaggttcccagagacttcccagcactatatctgggaggcctggtgctcagcagtcagggttcctggggctgggacagacttgggacctgctcagccatagtcatttaggctgtggaagtggatatggagtccaggagaggagatgggagaccagagggctgggggctggaggagcccagcatttaagtgacagaaccacaaagtgggaggaagacaagtctaggggcttgtggcatctcctggagcccaaggggaagagagtttctagagcaggggtctgaacctggggttcatgagcttgcatgggcacaagttgcatatttgttttgactgacccctgactgaagtttagcatttctttctgttatggatggaggaaacaaaccacactggtattattagcaacttctgtggctgtcacccatagcaatcaccaatatttccatgtcacatcatggtccttgtagagctctgagaatatcatcacggccatcactttgaggcagtgtcacttagcgtccagcccagcactggagcttgctacttactgtgttgataacaaataatatatgtttctttatcaaaaatttgttttaaaaatattttgataactactttaacataactaccttcctttctagttctatgctttttatttttatttctttttgagatagagtttcgcttttgttgctcaggctggagcgcagtggtgcaatctcggctcaccgcaacctctgcctcctgggttcaagcgattctcctgcctcagcctcacaagtagctgggattacaggcatgtgccactgtgcccggataatttttttttgcattttagtagagacagggtttcaccatgttggtcaggctggtcttgaactcctgacctcaggtgatccacccgccttggcctcccaaagtgctgggattacaagtgtgagccactgggcccgggctttttttctttctttctttctttctttttttttttttttttttttgagactgagtctccctctgtcacccaggctggagtgcagtggcgcgatcttggctcactgcagcctcttcctcccgattttaagcgattctcctgcctcagccttccaagtagctgggattacaggtctgagccaccacgcccagataaattttgtatttagtagagatggagtttcaccacgttgaccaggctggtcttgaactgctagcctcgagtgatctgcccacctcggcctcccaaagtgctgggtgagattataggcgtgagctaccatgcccagctgtaaacttaaaaaaaaaaaaaaaaaaacttttaaagttttttttttttttttttttgcaatgcggtctcactatgctgcccaggctggctttgaacttctgggctcaagtgatccaccagcctcagcctccccagtagctggggctatagtgcaccactgcacctggtttactaatcctacacttcaatatttaaaaaaatgcatttgacctggcgcggtggctcacgcctgtaatcccagcactttggaggccgaggtgggtggatcacgaggtcaggagattgagactctcctggccaacatggtgaaaccccgtctctactaaaaatacaaaaattagccaggcatggtggcatgtgcctgtaatcccagctactcagggggctgaggcaggagaatcgcttgaaccagggagtcagaagttgcagtgagccgagatcgtgccattgtactctagtctggcgacagagcaagactccatctcaaaaaaaaatagcatttaaaaactttattctggctgggtgttgtggcttatgcttgtaattccagcacttggggaggccaaggtgggtgaatcacttgaggtcaggagttccagaccagcctggccaacatataatgaaaccccttctctactaaaaatacaaaaattagctggacatggtggcacatgcctgtagtcccagacacttgggaagtggaggcaggagaatcacttgaacctgggaggtggaggttgcagtgagccaagatagtgctactgcaatccagcctgggtgacagaattagactccgtctctaaaataaataaataaataaataaataaataaaaactttattctgaaaaggggcttgtggcacagaaaaggttaagaacccctgttctagaagaggagtcagtcatgcccagtgctgctggcacatgcgagtgagaatgcctgctgcatctgtgtgcacacgtgtataaggggtgcaggtgcatgagaggcagcagctctccttgggaatgcacacatgaacacagacgtgtgttcaggggcaggcaggggagacacgcggcagaggacaggtccccagggaggctggagaagaatgtaatccacactggtcgagccctcaccctctcagttcaatggctgcttgggagaagggaggcatcagaggcacggtgaggtcccagaggaggcatctgcagcccctgcccaggagtcaaggaagccttcctgcctgcatactttctgtgtggttgggctcccgaggctggatcagcccacagacagtgggaccctggcccccagggacctgcctggcccttctcttcagctgtgatggaagcagctgtgtctggcaaatctcttcggctggagcatccttcctgtggaccttccaccttggcttctcatcccagctggcagcctctgtttcctgccattgcctcccctactctgctgtctgcactgggtactgaagcttgctaggtatttgggaatcagagactttggccaaatacaatgagttcttatacaacggggattccaagaagtggggctggcgtaggaacaaggaagggctcactcccttgccccctcctgaaaaggatctcaatgcactgagatggcatagcttataagcagaaccaatcatgccatttgtcatgtggggagttccttgtcgctggaggcatgtaagcggagggaggcctgggaccatctgcctggcaggtctcttcattttatggagcagctttctgtctcagctcaatcactgtgtcatctcgggcaagtgctgtcttctctgggccttcattttcatggccataaagtggggtgtaataatgtctgccatgcctgtctcccgaggcagctgtggccacaggtggaatgaggtttaaaggagaattagaagacaggagggtatgaggttcaaatcctggctctgtccctcactgactgtgtccttgggcaaggctaaggaacagagatgatgcccattcctgcaggttgttgtaaaggttcctgtggggtttggcaatagcaggtgccctagcaggtgcctgtggtttattttattttatttgatttataattattattattttttgagacagagtcttgctctgtcacccaggctggagtgcaatggtgtgatctcggctcactgcaacctctgcctcctgggttcaagcagttctcctgcctcagcttctggagtagctgggactacaggcatgtgccaccatgcctggataatttttctatttttagtagagacagggtttcaccatattggccaggctggtcttgaattcctggcctcatgtgatctgcctgccttggcctcccaaagtgctgggattacaggtaagacactgtgctggctgattgtggatttttaatagttgcatttttgtttttccttaaagcagttgctcttcattttttttttttttttttttttgagacaaagtcttgctctgtcacccaggctggagtgcagtggcaccgtcataactcactgcagccttgaacttctgggcttaagtgatcctcctgcctcagccttctaagtaactgggaccacaggtacatgccggcaaactcagctgttccattttttattgaggttaaatgtacaagttgagctcacaaatcctaatgtgcagttcaaggcgttttctttctttctttctttcttttttttttttttttttgaggcagagtctcactctgtcgcccaggctggagtgcagtggcgtgatctcggctcactgcaagctccaccttctgagttcacgccattctcctgcctcagcctcccgagtagctgggactacaggcgcccaccaccacgcccggcttattttttgtatttttagtagagatggggtttcaccgcgttagccaagatggtctcgatctcctgacctcgtgatccgcctgcctcagcctcccaaagtgctgggattacaggcgtgagccactgcgcccggccttcaaggcattttcatataagtcctctcctggggccaccactcaggtcaagaagaacatctccagtcctggaagcttccctgtcccccacctgccttgggtactccccaacgttactgctcttctgaccttcttcactgtagattggcttctcctggctcttaacttcatgtaattggagttacgcgttgtttgctctgctgcgtctggcttctgtttcccagcagagatccctccatgctgttgtgtgtttcagttgcctgtccttttcatggctaagtagtactccatgcgggcttctcatgcatggcactggtgacattttgagctggatgattctttgttgtggggctgtcctgtacgttgtagggtgttttagctgcattcctggtctctacccactagatgccggtgtcctatcccctcaagtgtgacaaccaaaaatgtctccagacacggccaaatgtcccttgggggacaaaatcatccctggttgaaaaccaccaccctaccccattcttctgttgatgaacacctaggttgtcccaggttggggctgttaccgataacacagacgtgcctgttctgggacgtggctttttgtggggtgtgtgagcatttctcctgggtatgcacccaggagtggccccgctgggtcctagcgtgggcatatgtttggttttagtagaagctgctgagcagccttccagagtggttgctgcctgtttattattcattgaataaacgaatgaacgaatgaatgtgtgaatgagtgtcctcccaaaaccccaggctctgaaacagctgatgttcaaattggtggccactgttgctcgaacacatgctacaccgtcacacatcacgggtggtcctggaacagggatgcacacgggcaccttccaggaaggagctgagcctggttcatctcagcaccctgaggcacaggccacgtatacagcaggtggtccttggatgcttgtaggcctggcctcagaggagcatggagctggcccaagaactgggatctggaacctcaggcctggagggcctgaggcctgagctccccctcctttgggttcactggggaccagcaggggagggacactcggtgtaggtgctggtccaccttccctacctccccgatccaggaggatggagcccccagccccttttctccacctgatttatttagacaactgaaacgcaccctgggaagtggatcagattttagatttgacaaaaataaaaacaaacttggccacccccgccaaacccagcactcccgcccccaccagcctcccagagccccccgaatcacagaaactgagtgtcgcctgggcctgcagaaggagggtggtggtcgccatggtaaccatgcaggcctctggctcggctcctggagaggaggctgccctgcagggcctgcccgggcgccgggcactgcccctccacacggttgctcttctagctgggaactggcaggtttgagggagccccagcatagtggcttccctggtgaccctgtccccttagtccacatcctgaccttctcaggccttggtggctagggtgtggtgtggttatgatctggcttagctgggttttgatcctcctggctgggggaccttgaggcaaacatgcccttgctggcttcccctccccttcttcctgcaggtagagctttccttctgaaccacagcaggggctggagcatctctcttcctgaccccactgcatacaacacaggcctgggtccccagcagggacacagccagacgggctgccggctgggctcaccactgacccagcctccgcttccctctgcctggctgggagcctcagagagagacgatgtgggtggggaggaaagagcaaatattccattaaacccatctcagttgggggtccctcacatcgcagacactgaaccaggtgatggcaggatgtgtggatgagaacatgggatttgcagccagtgagaggcagtgcagatcctgcccctgccacataccatgggagtgaccctggaaccacctcctgtggccttagtttcctttcctgtgaagtggggataacggtagtatcagccagtttgggagaactctgctgatgttgcagggtgaccctgctcattgctaggcctgaattggttgacagattctttttgatttttattttttgagataggatctcgctctgtcgctcaggctggagtgaagtggcttgatcttggctcacagcgaccttcagctcctgggcttaagtgatcctcccatctcaaccttctaagtagcagactacaggcgcgcaccaccacagctggctaattaaaaaatttttttttttttttgcagatatgaggtctcactatgttgcccaggctggtctcaaactcctgggtcaagtgatcctcctgccttgccctcccaaagtgctgggattacagatgtgagccactgcatctggcctggattcttttttttttttttttctgagacggagtttcactctcgttgcccaggctggagtgcaatggcgcgatctcagctcactgcaacctcctcacctcccgggttcaagcgatcctcctgcctcagcctcctgagtagctgggattacagatgcccgccaccacgcccagttaatttttgtatttttagtagagacggggtttcaccatgttggccaggctggtcttgaactcctgacctcaagtgatctgctcaccccggcctcccaaagtgctgggattacagatgtgagccacggcacccggcctggcctggattctttacaaaaggctgtgggcgaagattcagtatgctgcaggacagatatctatcacaggggctgtactagcatctcttcttttcttttctttttttttgtttttgagatggagtttcactctgtcacccacgctggagtgcagtggtgcaatctcagctcactgaaacctccacctcccgggttcaagcgattcttccacctcaacctcccaagtagctgggattacaggcgcctgccaccatgcccagctaattttttgtatttttagtagagacagggtttcactgtgttggccgggctggtcttgaactcctgacctcaggtgatctgcccgccttggccccccaaagtgctgggatcacaggcataagccaccgcgcttggccatgcatgctgtttgatttggaggctccttggcaaacagacactcaggggcactgaagaagtgttcgcgattgtcaccattattaccaccggcaggctggcgcctggcacacaacaggcacacaatataagcacattcattccccctgctcagctctgagaccccagttctgaagactttgagaggtgtggtgcggggacgtgggtaggaagtggggctgagggcccaggctgtgctgaggcgctggggggctctgcagcagcacccaaagaccctgagtgattttctccccgaggcctgtgtgcttgggacggctttgcctgccaaggaaactcgattgattgcatcaccattgatctgtttctccatctgtgttcctcaaaggcgctcagggctgcccgtcagggatctaaccagcttaaagtgatggtactgtggctgtgccgagtgtgtggggaaacgcggagggtttccgtgtgagtttgaaaaatcgactgtggcttggggacccccgtgggtggtgagtctgttgtctaagtgtcacttcagctctgggcttgctgtggagctgggacagatttctgcccctgttttccatcagtgcaatgagggattggagccgttgctctctaacgacgctggcagggctgctctgtggcaaaggtcaccccgactgcagtgagggcctgaggggtgaagtaggcgaggcagctgggccttggatgcccgtcgcagggcttcaagcctcgctgtgagaggcagttgggagccattgaagacgtcctgccgtcgtggcactagcactccagccctgccccctctgtcacccagaaatcctgtgctcccccttgggtctccagcttccctcaggttgtccccgaacctcacggcttcgcttgcctgtgttctcagagagttcctcaacacttgtgactcatggtggaagcatgaggcgtcaggccaggctgcagagtggctcaagccggagaccttgactccccccgccaccctcctaccccacactgcactgtctggtttaacttcaaggagggctggtgcttttgatccctgagccagtggggagtgtgtcaggaaccgcgggcagtgatgccagttctggcctgacttctaagcctcctgggctcttggaaggggcccaagctttgccatctgggatttccccgggcacctctgggcaagggctgagaccatccattgctgaatttctgaagctgagcagcccagggatgaaagccactccatctgcctcctgcggggacccagtgcagtgggcgagttagatgggccacagaggcagtgctgtgcagcggccaccagcactgctgtgaatcagacaatctgggctgctcggggactgggtgaccttgtgtgagtggtgtcagctctccaggcttgttccttttccatccccaggggattgtgagagctgaggtcatgtccctagggtgtctggtacacagtcgtcagaggtactgccaaattcatcactgtggtacgtgctagccagggcaggtgggagtgcttctggagaggaggctgagccaccaccttgtgaggggcaagaggcacatccggggaagcttcaagaagaggtgacctgcgaactgggctctgaaacagtctgcctgctggagaggtggaggaaagggaaagtgtaggcagaaggcgtgtttggagaaagcgagtgctgaggccagtgagtgataagactgcaaggattcactgaggcgagagtctaccttgcgtaccaggcttgggagggtgatggggagccatgggaggttcttgagcaggagagaggcatctggagagtgtgtttcaggcagattagcctggcagtggcaaaacagcttggaggcaggaaaagcctccagcctgaggttttgtgtctcagctctgctcttttccagctggtgaccttgggccaatctgtttcccttttgtgtcttggtttccttatttgtaaatggggcttataaaagagctgtgaggattaaatgagataacatttggaaaatgttcaagttgtgttgggcacacagcaagtgcctggttatcgtgtggggcagattggaggggcagagaccagagctgggggataccgaggatgctgggtcagggtcctggggagacacactgaagatgggctgagaggcctcaggggagggaggagagccatgggcagagacaggccgtacttcacagaggagagcgctggccttggagtccagcaggcctggtgtgaatctctgtgccagtaattcctagctgtgaaacccaggagaggcccctgatttccccatgtctcagccttccttatctgtaaaatgggcctgctgacctccactgctcagggccttgttgaggaggcagcaggggcaccgggctcctgggagacgccactaagtgcactttgagcctgaaactggcaggaggggcagagggagcagaggatggggctggaaggagagagcgcacgacaggaagaggggaaaggcgagggggatgggggatgttctttggtaattagaatgttcgaacttcaaaaaagttaattaatgatgaagctgctgctggagccaggctcaggctcgaagggggccctggcagcgactgaaattaattacaggctatggcgggagagtggcagtggggtgaggggacgggaaggagcagggctggggccaggaggagctgagaagaggccacgagtaggcagcatcccaaagtgggcagggctggggatgggagggaggctgttgccatggaaaccaggtcacctctcccactcctctctgggtggggtcctgctgagggtttggctggtgtggctacatcccagctaagggcaagggctttgaaatggaggggtgaggggtttgcttggagacactcctgagtccccggatgttggagtgggcagggcccctagagatttacagtagcacccccccttacccacaagggacacattccaagacccccagtggatgcctgaagccacaaatagcactgaaccctatatttactatgtttttttcctatacctgcatacctggataaagtttaatttataaatcaggcattgtaagagatgagtagcaaccaataataaaatagaacaatcacgccaggcgcggtggctcatgcctataatcccagcactttgggaggccgaggcaggcggatcacaaagtcaggagatcgagaccatcttggccaacatggtgaaaccctatctctactaaaatacaaaaaaattagccgggcgtggtggcgggcgcctgtagtcccagctgctcaggaggttgaggcaagggaattgcctgaacctgggagacggaggttgcagtgagccgagatcacgccactgcacttcagcctggcgacagagcaagactccgtctcaaaataaataaataaataaacaaaaataaaaaataaaataaaataaaacaattaggccaggcacaatggctcatgcctgtaatcccagcactttgggaggccgaggcgggtggatcacctgaggtcaggagttcaagaccagcctggccaacacggtgaaaacccgtctctactaaaaatacaaaaaattagccgggcatagtggcaggcgcctgtaatcccagctacttgggaggctgaggcaggagaaacacttgaacccaggaggcagaggttgcagtgagctgggatcttgccattgcactccagcctgggcaataaaagtgaaactccatctcaaaaaaaaaaaaaaattagaatcacgtacgataatcaaagttatatgaatgtggtcatgcggtctccctctttctctctctcagaatctcttattgtaccgcactcatacctaattttgggccacagtggaccatgggtaactgacacggcagataatgagggacaactgtatttattcatccgacagatgttcattgaacacctactagatgttaggccgtgagtgtaaagtccctgtcccctttggaatgtagattagagcagtggcagagacaatgagcatgtcagcaagacagtggcagggcgtgaagagggcgtgcggcagctgggggtgatgaggttgggtggagacttctcagaggaggtgaacatgatgctagaagctcagcccttgaagtgggaacagcacatgcaaaggccctgaggtggagtgtcctgatgtcactcactgtgtgtctgaggagcggcaggagccagtgaggtcagagcagagtgagccagggcagggcggagagagatgggggagcagggtggagagagatgggggggcagggcggagggagatgggggggcagggcggagagagatggcggagagagatgggggagcagggtggagggagatggggggcagggcggagggagatgggcagggcggagggagatgggggagcaggacggagggagatggggggcagggcggagggagatgggggagcagggcggagagagatgggggagcagggcggagagagatgggggagcagggcggagagagatgggggggcagggcggagggagatgggggggcagggcggagggagatcggggggcagggcggagagagatgggggagcaggatggagagagatggggggcagggtggagagagatgggggggcagggcagagggagatggggtattagggcccagggagatggggtgtcagagtggggccctgcaggccaggcaagggcttcaaagtttgtgctgagagagcccaggagcaggggcagggttttgtgctggggagggaggtggtcttgctgatgtttttaactgcccactgctgctgcaggaagggtggtttggaggggccagggcagacccagggggccgatggggaggctcctggtcatccggtggaggacctctaggttcagagacaaggaggggcttgccgaagaccgcagagccagtcagtgctgggacgagttcaaatgcaggtctcctggcttcgtggtcttgtttgctgcttttactgcatgagagcccctttctgtctcctgacactcagtttctgggggaggaaagggggttgcataggtggggtgtggtgagttccatcagcatctctcctcttacagaaggagaacctactcccgactccagtcattgcctgttaagttcagtcaggctgcatggtctggaagttcacctgggtgtctgacttcatcatactatgtgtggctcaagtccatttcatcctggactgcctcttttcaagtaggcacagattttcgaaggccccaggactcagtcaactggagatcccgttggggagatctgagcaggcttcggatttcttactggtatgacaggcgggggctggaagtgacacagccctgagctccttgaggcctgacctccctggtcctgtgactgggaggatagacagtggcgggactggacactgcgggctgtgttctaaggatgggtaggagttggcctgggagggagggaggagggcattcatggaggggctctcagcagtggtgaggagagcagcctggccaggtgcaggaggggagcccattcaccccagctgcaagctgtgcccagaggccctgcccaaggccaggttcatggccagctctggattccctccgcagcaggagactttctgcctgtccaggactgaggggcccagccccaccccatgtggtgcaggccagggctgggcttggtgcgggtgttttggagttaggtgatgagccctacctgagccctaaccctggcagtgggcaaggagagaaggacggggccatccagccaatctcagccccactggagggccctctgcgggctccagacccagaccttggcagagacggagggaacatgggtcaggggagggaaaggtggtcagagaagggaggcagtgacagtcagagggtggtagttggggtggagaggctgggacagcccagagttccctgacagccaggcttccgggaacctctcccttccctgggcctgaggggagctctcaggctggggcaaggagtggggtcctgcagctgggggcctggtgggtttggcgcatatggccatgtctgttgtgatgggggcagactggcaccacgggctttgagctgtttcagggatggcacccagagggagaagaatgaggaatggggtgtatgcctgtgtgtgtggtgggttgcgggtattacactctagggtgcaccccagcccccacgggcgatcccacctgctgctttgtccttgacttggtgtgcacgtggtttgaatgtgtcagcatgctggtgatcctgctgaactgcgtgacacttggcatgtaccagccgtgcgacgacatggactgcctgtccgaccgctgcaagatcctgcaggtgagccggccgccccgccccgccccgccctgccctcatcctccaggacccggcctatgccccgcccactccacacccccgccccatgtcctggccttgccccgcccactccatgccccgccccgctccgtgcccttccccatcctgcgctgcactaccaagcgctgccgcactcagccaccaccagccgcactcacttggctgacccttcctcactcccacctggtcttacctattacccttcggatcctctcttccctttatctctcctctccaccttgaagcctctaccttagtccaggcctcaatcttctcctacccgggtgcccccaccagccttctcctgcacccgccacatgcacacctgcaaagaacagtgaccccgactctcctctgcctacaacctgcacttcgtcccccgtgctcttggactagaggccaagttcacaccctgccctagatgccctttaggagcgggcctctggttttacattctgttatctcctgaggtcctggggtggggcttgacctttggtacctgacataaccctgtgcagagcatgtatacgggtagcacagatgttagggttgtacccattttacagatgtggaaacactcggtgcaactccctgggaaagccagattcctcccgggaggcattgctttctgcctcttgggttttttttttttttttttttttttgagacagagtctcactgtgtcgccccaggctggagtgcagtggcgcgatctcggttcactgcaagctccacctcccgggttcatgccattctcccacctcagcctcctgagcagctgggactacaggcgcccgccaccacgcctggctaattttttgtatttttagtagagacggggtttcaccatgttagccaggatggtctcaatctcctgacctcgtgatctgcctgcctcggcctcccaaagtgctgggattacaggcgtgagccactgtgcccagcctctgcctcttgggtttctataggactcagtaactcccaggcagcactgggccagagtctccccgggcacttggtaaaaatccagacccctggccgggcgcggtggctcatgcctgtaatcccagcactttgggaggccgaggcgggcggatcacgaggtcaggagatcgagaccatcccggctaaaatggtgaaaccccgtctctactaaaaatacaaaaaattagccgggcgtagtggcgggcgcctgtagtcccagctacttgggaggctgaggcaggagaatggcgtgaacccgggaggcggagcttgcagtgagccgagatcccgccactgcactccagcctgggcgacagagcgagactccgtctcaaaaaaaaaaaaaaaaaaaaaaaaaaaaaatccagacccctgaccccatctcagacctgctgaagcagaatttctgggtgggtctggggtccgagtgggtaacaagctcctcagcagccccgggccccaggcctggttagcctcatggtgagttcaccgaacaagcacctctgtgtcctcaccactggcctagccctggcacacagtaggtatgtggcacctgtttgttgaattgagttggctgcagccctcactaatcctggaaacaggaattccacccagtccccgccctcaggaagcataatctcatagcctcctttgtgggcagagaaaggcaacactgaggcctgtgcctgggggctactttgagacagctgcttccatgggggctttggggtgagacccaccggagtttcaatcctggttctgccacttatctgctgtgtgacctgtggggcaagttgcttaacctctctgagtctctgtttcctcatctgtaaaatgggactacccatggggtccttgggagaattaggagagagaatgggggtcaagtgtgtagccagtgcttggtaattattagggagaatatgggacggcccctcaccccacccccacctggggctcttctatctgttcccaggcttagggaacagatagaacgggctgtatgaccttgggcaaactcattcccgtctctgggccacagtctcctcatctatgaaatgactgcattggactgggatcactgaggttctcctcctgcccaggaggagtttccgggtgtttcccaggccccttgcatccatgtggtgtccccacctcacactgtggctgcaacccctgggccctgctctgcaacctcaccctgtcccttgcttccctcctcctgcccctgcaggtctttgatgacttcatctttatcttctttgccatggagatggtgctcaagatggtggccctggggatttttggcaagaagtgctacctcggggacacatggaaccgcctggatttcttcatcgtcatggcagggtaggtagcgcccgccaggcaggtcctagcctctggtgcacaccaggcataattgagagaatccagggcttcttgctgatggcgatgaaggggaatcacggtgatgcgtgggaccctcctggacccctgggctgggaggaatgatggacagacagacattctttcctcccttcctaagttgtgcgtcctccagcactgccagcggatactgggtgagtttatgctaattaatgatacgaccttgagagagccactgacgctctctaagctttcatttcctcatctgaaaaggggaataataatagtagctgcgtcaaaatgagcacccaataaatgctagctgttaggattgctatcctggatctctcatcacgccagagaccgagcacagactcaagcactgtctgactccagactgtggttatttctaccgagacacaagctgccgtcagggacaggcctggttacagctgagcccatctggagcgtctgtgaccctgctctgggtcttgtgcctgctttcctgggtcaaacccatccatgcattcatccatcaaccagggactgaacaacttgctccccagtgttggcgccgccctagctgctgggggcaaggaggagagcaagccagacacaggccttgtccttcctactcctgtctcggggaggcacccacctgctacgccagtgggcgtgccttcacacacggggaccagggcgctgggcaaagcatgtggtttgctgagagcatttaacacagcagcccgactgagccaagctggggacttgggggcttgagggcttcctgaggaggtgacacgggagagctgaaggatgaggagacattaaccatgcccaagagtgggtcattattagggcagaggagagagaaaaaggctggaggctgtacgtgtgtgtgtgagagagggtgtgtgagtgtgtgtgtcagtgtatgtgtgtatgtgtgtgacctcgtgtgtagaatgctattgaggaggtgtgacctttttgattcagtagacgcatggctgagacggacagtcagggtgtgagaatcccatcaggtatctgctaaattccacagatgtgttctgaagtgaggtgattcgtttcactagggttttaaaaaagttacacctcttctaagcttgcttgctctctcgctttctctccttccttccttccctccctccctccctccctccttccttccttccttccttctctctctttctttcaccctccctccctccctccctccctccttccttccttcctgccttccttccttccttccttctctctctctttctttcaccctccctcccttccttccttccttccttccctccttccttccttccctccttccttccttctctctctctttctttcgccctccctccctccctcccttccttccttccttctttttttgagatggggtctcactctgtacctaggttggagtgtggtgatgcagtcaccacacactgcagccttgacttcctaggctcaaaggatcctcccacctcagcctcctgagtagctgggactgcaggcatgtgctaccaaccctggctaatttttcttttcttttctatagagacagggtctcactatgttgcccaggctggtcttgaactcctgggttcaagctttcctcccacctcagcctcccaaagtgctgggattacaggtgtgagccaccgcacctggcctctaagcatcttctctcaatcactgtattcagttttacaaacacattgtcaacagtcactgagacctgtacggaagctactctggtttcctgtggtttcctgagcactgtatcctcctcttagtcacgttcttcgttttcattcttattctggtttggctggagaacatctttaagtagtttttttttaaaagaaaaggtgtttggatagtgtcatttttcaatcttgcctgtccaaacatatattcctttgatctttgagtgtggaccgttatttgtgctattgtagagtcagaacactgcacacatcctgccattcaaacctacactatagtattgcaggtgagtccagtacagatctggttcctctttctcggaagatgaccttctttttcctgactagaagcttgtgggcttttctctttaccttcacaatcagacctttctctagggcaggtctaagggggaccttagagaactcaagactggtgcttttggccaggtgcagtggctcacccctgtaatcccagcattgtgggaggccgaggcaagaggattccttgagcctaggagtttgagaccagcctgggcaacatagtgagaccccatctctacaaaaaataaaaaattagccaggtgtttgtggtgcactcctgtagtcccagctactcaggaggctgaggctggaggctgggctccttgagcccaggaggttgaggctgcagtgagcagtgatcgtgccattgcactctagtcttcaacaaagcaagaccctgtcaaaaaaaaaaaaaaagattcatgctttccatcatctcagaagaaagttcttccatctcttctttgactatggcccattattctctgctgtctccttctggaattcatgttatatagatgtttctgtcctctatcttttgtccatgcctttccccttttctttcacagattttgcttgtaatatgagagaaatctttgacttgggcttctgaatcacaagtgggcttttcagcaatgtcctttcccctatttactgcccctatggaataattcatttcctcagtgtctttttaattcacaagaacacttcttgtttttggatttcttgtttttcagagtaccttgtgcctgttcttgttttatggatgcctgctcttgttttatggatgcctgctcttgttttatggatgcctgctcttgttttataaatacaatattcacctgaatctccttatatactaattaggcttcttaaaagtcttttcacgattctggaagtaaccctgtaccaaagtataatttctgaaaaggtaaaaaaagtgacccttacacaaatcttagaatgaatgtatacggcagatttatccagctcgttaaggagtagggactcagcagatggtaatcagcagaattaggaaaacagacatcggagaaagaatgtaggaagaaagtgagattagagtcaaaactggttaataacctacagggtaataaaccataacctttggagttatcttttgggcagaaatcacatacatctctgccagataaaaatctacaagttaaaatgtaatttcatagcatccagacctttagtgaacaggaaattgtgaagcaaacaaaggtattttctccctggataatgaaataatctttaaatggcctgttaaattatgcttcaaaatgacattgcgagaaatagtgccctccttttgccgtatttccaagttctagggtaatttttcctaactcttgtttcagggaagtcatttgttctgctggctccacagactgactcccatgggcacccccacgctgcccttttgacttgaagcattctgtattgcttagcgattctttcctgtctgctcatatttataaataaagacgatgaggctctaagctgagcagggtgaagagctgcctagcttcagcattgtggtgagctctcagtttgacattttctcttggtcctcgagatgggggctggatgaggcgaggtctgcaggccagcatccttgggagatcagggagggctgggcatggggctgacatgcgatgtgtgcggtcacacagggccccacgcttgggtccatactctgctgtcactattttgaaattcttaatcatttatgaacaaggggccctgcatcttcagtttgcaccaagtcccacaatgatgtaggtggtcctggctgagggatagatgcaaaggagacttttttttgaggcagtttcattctgtcacccaggctggagtgcagtggtgcgatcacagcttactgcagcctcgccctccctggactcaggtgatcctcccacttcagcctcccaagtagctgggactacaggcacatgccccatgcccggctaattttttttttttttactttttaatttttttgtagagacaagctctcactatgtgacctcctgggttcaagtgatcctcccaccttggcctcttgaagcgctgggatacaggtgtgagccaccacgctcagctgacttttttgctggagtcatgagcactctcactgcccagctatgtgctggatttgggaactcaggtgaacaggaccaccccgtgctcaaggtcgttcccatcctttgtgcccaggggtggcgtgggtggagaggacaggatggggagtcacaaccctggctccagagcccagccctccggtccccctcccacccaagacccatccccagagctgcccacccaccccccaaatcccacccaggcctggtgctataaatgttctgttccccgagtaaccggcctatttgctcccttcctctacctccccttccccaaattaattactagctctttcttcaagctgtggaggcagacatagcacctccgagttagaaggttccttagaggtcacggccttcatctccacatctggtgtaaccctcatggcaggtgtgtctgagactggggcctgcctctgttcccaggctgcccctgcagggagcacagtgcctcaccaggcggctggtctcaaactaggacatccaaatgcactagaaagctctttctttcacggagctgaaactgatcttcctgtggctcccaccggatggtaccattcattcattcattcattcattcactaaatcgacctttattgagcatctactacatgccaggccttgtgcagagcagtgggggcatgaagatgaacaagacaggccctttgtgatttcacgtaactttcagtttggaaaacagaaataaaacacatcaccacaactaaagtctaaattgggatccatgctgttgtcaggaagcatagagagccatcaggtcatggaatggggtcctgcttttgattggggggtgtcactgtatgtcacactgagggacagacctggggtaggtaagagctggccaggcagagagctgggggaaagggagtttcaggcagcggggaagcatgcaggaggcctgagggggtgcatgaggaagggaaaggtgagtgacaggggatgctggagcccagggtttctggggggtgggtgctaagacatgaggccagagaagggcaagggcttcattgcacaggcaaggtccagaggctgcagggatggtatcactgacaaactcatagccgtccttcagaagttggggggtggttcctgtcctcctcaagtctccccttccagatgaaatgtccccagccttcccaccatttgtcaaaggacagcgttcatcccttatctgctggactcgcttcaggctgtctctgtccctggcaggagaacgggatcccaccctcccaatgatggcttatggggtagagagaatgggctgccctcgcctcagtgaagtgtgggattgcggtggcctggggagtggccatgctcccttttgccgtcaggtcatgttcactctccaaaccaggtctctcccaccctggaactaaaagttggtgatttttaaaacccacgtgaaaaactttgcacttactgctgttgagttcatctcaccgtggcctcttggagtcctgaggcagccgctcattccatgcacttcctgcactcgcacagctcaggatagtgagtcctgtggcaccgcactagactcttccagtgtgtgacaaagaccccgtcatcatctctatttgtgtttggttgaacccaactcttttatttattattcttttttgagacagggtctctttctgttgcccaggctggagtgcagtggcgccatctcggctcactacaacctcagcttcctaggttcaagcaattctcatgcctcagcctcccgagtagctgggattacaggcatgcgccgccatgccggctaagttttgtatttttagtagagacggggtttcaccatgttggccagattggtcttgaactcctgacctcaagtgatccaccctcctcggcctcccgaagtgctgggattacaggcatgagtcactatgtctggccaatcccaactctttgtcttatcatttaagctacacttttctgcctctgtccattaggaggtcatgaactattcaatcacattcttgctgaacttgagacgttctttatctgtgtatctcccttggtgcatcatgctggtaattctatctcctcccccaaccagaaacaaaatggccattgccacctgtggggaggggcctgggcacttctgttaaaagttccccaagaattctgatgtctggtctctgggggtgagccaggggtggagggtgaggctactgggatctctccagaatgaggtttgccaaggacatggctgatgtgggccctgtcttggatgagtacagagaacaggaggcgccttacatctgaaagacttcgcaagcttctgactgtgtggagaatggaacagctgagggcagggtgtgcatagatcaggaatgcgaactgccccactccccaaacacatgcacatcctttcaccccttctcaatgttcctccaacgtcagggagcagcaggatcactggggcatgtgtttaaaagcagatttctggccttagctcagggatccactgccagcaggcaggcagagcttagaaatctgcattgtaaccaaacgcccaggtggccctgatgtggtctgtgggccactggtggagaaattacagctcattcgactgtcacagcagcctctaatcaggaggactgaaaggtacaggtcatgattcccagtctgggaaccgcaggaaggggaagagagatagggagggctccatctctgcatctgtgtccaggatttgaataattttcatgacaggtagaagtactttgtgaacagaacagtgggaactctatgtaagaagttctgtgattggccaggcactgtggctcatgcctataatcccagcactttgggaggctgaggcaggcagatcacctgaggtcaggagtttgagaccagcctggcaaacatgatgaaaccccatgtctactaaaaatacaaaaattagtccgggtgcggtggctcacacctgtaatcccagcactttggggtgccaaggcgggggggggtcacctgaggtcaggagttcgagaccaacatggtgaaaccctgtctctactaaaaatacaaaaaaattagctgggcgtggtggcagacacctgtaatcccagcgggaggctgaggcaggagaactgcttgaacccaggaggcggaggttgccatgagcccagatcgtgccactgcactccagcctgggcaatgagagtgaaactccatctccaaaaaaaaaaaaaaaaaaaaaatacaaatacaaattcaaaaattagccaggcgcagtggcgcacacctgtagtcccagctgtttgggcggcaggagaatagcttgaaccgggtggtagagaggttgcagtgagccaagattgcactcctacactccagcctgggagacagagtctcagtctctaaaaaagaacttctgtgatcacccagtccagtggtgtgtgtcaattgttccagctactcaggaggctgaggtgggaggatatcttgagcccaggagttagagatcggtctgggcaacatagcgagagcccatttctttaaaacattttttaaaaaagaatttctatgatcattaatagtattaataaagtaatattagtaacttagcaccttggctagagggtgagaaggagaggctgggttaggacttgtatcctgggctgagtgcagtggctcttgcctgtaatcccagcactttggcaggccgaggtggatggatcgcttgagctcagaaggttgagaccagcctgggcaacatggtgaaaccacagctaaaaaaaaaaaaaatgtgtgtgtctgtagtcccagctactcaggaggctgaggtgggaggattgcttgaggctgggaggcggaggttgcagtgagccaagattgcgccactacactgcagcctgggtgacagagtgagatcctgtctcaaaaaaaaagaaaagagaaaaaaaaaatttattgtaccctggaaacatggtctctggaatgctgggaacagcttctccaccctgactcttacagactcttgggaaacaaaaagccactaagaattgttcctcagctctgggctagggctttctagaaagatcaggcaggtatgtccctgctgaggttgctggctgagagttccttttttccaaagtgccccatcagtgggacttcaaaaggcaaaggtaatttaattctctgatgcctccaggagtgtgataagaataaggacgctgactgctgagtgctcacaccgtgcatcatcctgttgaatggtcagacaagccctgtgagggctgtggtcagttccacctcacagatgaggcagtgacaggagtaacttgcctgaggtcacaggctggtaaggggcagagtcaggagttgaacccagggagcttagctccaccagctccaccaggattgggtcctggttcagtgtgactgctgggtgtatttgtcagggatgcatttggctgcaagtaatagaaaacccaaccaactgtggctcaggcaaatcctgaatccgtgtttttctgacataacacaaagttctggttactggtgatagttctgcagtgtgggggctgacatccttgtgattttccaggcctttctttcatggtcacaaggcagccggtgaagccgtgggtgtcatgtctgaattaaagacaggaaagaagggtgaagagtgacagggcatgtccacttggatcaggaaaatgagattttctttccgggatccttcccttccctagtgcatttggccagaactgggtctgatggacacctgagtggcagcaaggctaggaaagcagaaagcatcattgaacttggctaaatcaaacaagagttgttccttgggttcaggcaagatcacaagagagagaacgcccatcatgggggcactccgagtcagccacattcctctccttgagcctcagtttcttcacccaccctctgccaaagccgtggctctaccatgtctccaagccctggttagagcttctggagctctgcctgtgctgactgggcaggggcagggctctgttgagatctctaacgtcaataccaacctaggcaagctccacagagcccagtgcctgtcagcagatcctgctgtggtcatgggaatcagaaggcaatcacttggatgcccagaagcctttggagctggccttcctgcacaactctgtgtgcactattggtgggtaagggaagccctccgaatgtcttgaagcccaggggacccttctggttttgtcattgactttacactctgatctatcctggacttacaggtctgtctgccctgcggctgtggatgctcagatgcactgggtgctctgagggcaggaccaaggctagtcatcatcctgaagtccccagagccgtggaggcatcattacatgtttgtttcctgtctgttgcacccaggcacgaaagagctggggagaggatatctggagccattttctttaagctgagctgccgttgggtgggcgtggactggggaaggttccaataggaaccttagtgtgtttttctcatttgcatatgggatgggatgggagagagggtgatggtcactgtggaggctcgtttccatggaaacaggatggtagctgccatgtgtgatgttgggggaagtcaccagagattctctggccacaggctgaggtgcctgacacgggtcaatcatgaatcgggaaggactatctctgttacgtgggacagaaaccctgaatctggtttaagggagtcaactgtttcctctactgaaaagccaagaggtctccagcttcagggcccgcttgctctagaatcctgaaagatgtctctagatggtgtgtgctcctatcccacagctctgctagtctgtgctgacttccctccctggagctttcacggtggcagggtggtggcaggcagctcggggctcagtgccgactccctccagttcagacacacctttcctttcctagcagttccaatcagtcctgggaactgagcctctttggcctggattggctggtgtggggcatgtgctcatccctaagccaatcactgagggtagggtgggcagagctcctataggccagacggaggtgaaggctcacccctggcaggatgtgtcagctgtgcccctatcacgtggctgagggtggggaggctggtcagggaggctggaaagggatgctggacagggaggatcccaggccaggccttgttactcctggagttcacaagggcgccctggctggtggaaaccaagccgtttaggtggcctaccatgaactatcattaactgactgagttgggcttttttacacccatgatggtgttacatcctgacaatccccagaaattagtattgttaacaccattttgcagatgagaaaatggagtgtcagagagattggtagcctgcctcaggacacactcagcctttatggatcagatctgggattgctcaggtctggctgcccccagggctcgtgctcacccatgacatgaaggggttgtacatttccagaggctgaaatataagccgttgatttgcctcactagccctcagaaagcagtgaggtgagtcccctgagaggaacatttcccccaggctctggttagagccaaaagcatctctgcaccacacagagcccactctctggttcccagcagccattctcacctgccgtgctgccaagactactctggagtaatggagctaagtttcacgggaggcagacatcatgaggcatacactaaaattattcattgtttatctgaagctcagatttaactgggaagcttctatttatctggcaactctacccagaaataaaccactggagtaaagtaacccaaatggaggcttggagagagaaggtccaggtcttctgccactgaggttcccagagctgccctggttcccacctgcctgggttctgtctttgcagcccatccctcagctttgtggccaacccagcattcttcccccaaatcccccctgtactctgagcttggcctgagttggtttcagagcgtcagtcaactgggcttaataacctctgttctttggcctcataggtttgtgtgaggaactgcgagtgttgctgttgtttgaatgtgtctcccatagttcatgtgttggcaacctaatgccaagtgcaacagagttgagaggtgggacctttaagaagtgaccaggtcatgaggactcagccctcgtggatggattaatgccattattgtgggagtgggatggttatcgtgggagtgggttcctgatgagagggatgagtttggccccttccctgtctcacacacactttcttgcccttctgccacgtgatgacacagcaagaaagtcctcgccagatgcagctccttgatgttggacttcccagcctccagaatcgtaaaccaaattaatttcttttttaaaaataaatcatccagtctttctgcttctgttatagcagcagaaaatggactaagacaggtatcttagtctgtttggggtgctctaacaaaataccataaaccgggtgcctcataaacaacagaaatctagttctcacagttctggaggttgggaagtccaagatcaaggtgctggcagattcaatgtctggtgggggccacttcctcatagatgagtcttctcattgagtcctcacttgagtcctcacgtgaaggggcagatgagtttccctttgcctgttttaaaaaggtgctaatctcattcttgagggccctgccttcatgatctaatcacctccccaaaggccctaataccatcaccttgggggatagaatttcaatgtatgaattttaagtggatataaatattcagaccatagcaatgggtgaaatgacccataaatcatgaggtgctggccacagtcaagggttaatgtcattactcccaaatcctctctattatttccttcctccttctctccctccttccctccatccctccacagaacacctactgtgtgctaggtccccggatattggcaatggctggtggtctagttaccaaccaacacaagcctgagtcatcacagagctgcctcctgacagatgatctgtgatttccagcatctcagcttcccttccattagctacatcttaaatcacattttaagaaagcccccgtgggccccttgtgaagattgaggaaacaccctatttttatcagccacacacagaaatcatctcctgggcggggtatttcctggaaagatgttaaatctcagtcatttcttgtggcttcttgtcagctccaagctttttttttctttcttctttttttctgatcttgtccctcaaattatttgtttgacaaactcacacagggaatccacctctaagtcagaacctgggctgggcactggggacccagcaggggctctgagccaacccctgctctgaggaacagggacaggtgcccagaggtgccctcatagaggatcagtgggacaccaggcagaagagctcatctctgcctgggggtggggtctggagagggcctcatgtgattcgtgggcgcgtgtgagctgaggtaacagttgaggctgcgatacaataatagctcacatttcttggctgttccttgtgtgaggccctgttctgagtactggatctgtatatgaacatgtttcaggtcagtgacttgcccaaagtcacatgggacacaagcagcgagctgggattggaacccagctctgtactctgaccatcgggtagcactgccttggaggatgctggccctggtcctagtgctgtggtgggcgctgtgccttccacctacctggtcagcagagggtaacgctcccgagccggaggcgctggcctgctccggccttgccggtgactgatgcagtgggagagggggcaggtcacacagagctcctgggtcccttggtacctgtctgtgggacatggatcccttctttttttttttttgagacagagttttgttcttgtcacccaggctggagtgcagtggcgcaatctcagctcactgcaacctccgcctcctgggttcaagcgattctcttccctcagcctcttgagtagctgggattacaggcgtgcgccaccatgcccagctaatttttttttatttttgtatttttagtagagacagggttttgccatgttagccaggctggtcttgaactcgtgacttcaggtgatccacctgccttggcctcccaaagtactgggcttacaggcatgagccaccatgctgggcctgacatgggccccttctgtctcagtttcttcatctgcagtgggtgctgtaatccagctgagagaggagtacttgagggaaggggtatgaagcttgcggcaggtagcgagtgctcagataacctttctaaaccaaccgggaccctgagttccagttgacagaaacacagtacaagcaggacctagaacccaaaaggaaggcactggctcaagtaaccggggagagcagagggtaggtcagggatctgggctcagctggagggaggtcctccaagcatgtggtcaggagcccgcctctctccagctcttgcttcagccttcctttgtgttggcaaaattctcaggccaccacagagccaaggtggcctccgggtttgcaggctgctgcttagccagggagaagggctcttccctgcagtcctggcttaagggctgggctgcctttgtggctcacctgggatcacgtgcctatcctgaaccaaccatggtggcccagctgggggcatgggatcctctggtggaccaggcctgggtctctggacctctgctaggagccaggagccagggagggaggctcttcaaggaataaggtcggagtagagggtgctgggaagaaatggtgtccaccctccctgccctcctttgcatggcccctctaccagtctgaccacacgggagcccctctccccagaagacagccacctcctcctggggcgacttcaggatggaagtgctctctttaaagcaacattacttacctaattaagcgcttaggagctggcaggaggtagtggggaggttttgttgatttcttttttagacttttagcactgaagttgcgtgagaaagtaactgtgtaattaggaattaatttctcactcctgtaagcgatgtcttatttggggcctgaggggagtcagcccacaaggcggcccttccttaccttctctttttggaatgtgggcaggaagtcccagctgtcttggctgtcactggggtggaaagaggagaaggggagggagatagcttcctccatcccaggtggccctcagcaaaaattgagacgtggtgcttatgcctgacatggcacctagggtgagcagacactcgggggagatggacggaggccacattatggagacccttgaaggtctctttgttctgaaggcaatggggagtcactgagggttttaagtgggagtgacacagctaggtctgagtttaggagatttctgctgactgaggaagggctgtaggggaggaagcaaggggcaggagggcaattgggaggcttgtgccactgtcgggacagagggagggtgatccgggctaggacagggagagtggaactgtcagcaagctatcccaggttgggccaattggtgcattgagtcattgtcaagacagtgaggttcccaggacacagacttaaacccacaattcctccctcccaactaagtgctcttccctcttccctcctctctccccatccttgtcctgtgtcctcctttctatcctcttctgctcagagaagaatgagaactacacgattcttcactgtgcagctactatgtttcttcttcactgaatgcatttatatgctcttattcccccaggcaggagatgcggccaccgcagaatacccgcaaatggttcatgaagtggagaagtgagagttaggacccaggagaaacatttaagcaaatggattccctggaaggatctacagtgtcaagatctttcatgctgctaagaactcagtaatatcacatttccttttttgacttggttgccaggaagctcagagctaagatcttgacaccagattctacaggaacgttttcttgggggagcttttcaccggggtctgagggctgcacctggtggattctcaggggaatttggggaatgtttgccgcagacatagactgcaggtgtgttcccgtgctgaagacccagagggtcatgtatggcgtgaaggaaaggggctgggccaatgtgttgctccaggcctgccctatttggaccagctcagagtgtttgggagcttcaaatgcactgccaggcagcggctgtttctgttcccctccaagatgggggcggatggcggggaggttgcccaagtctgtagccgagagcacacgtgtctgatcagcctcctgtggcaaggctggggtctgggaggtgttcagatcctaaagttactaactgggtcatcgtgggccccccctttgacatccagtcacaacttgtatctcattgaggaccctgggatcagtctcttcctgccaccccttgttgtagagaaacacaaagtgtaagaaaacactctttgtcggctgggcacggtggctcacgcctgtaatcccagcactttgggaggccaaagtgggtggatcatctgaggttgggagttcgagaccagcctgaccaacatggagaaactccatctctactaaaaatacaaaattagctgggcatggtggtgcatgcctgtaatcccagctactcaggaggctgaggcaggagaatcgcttgaacccgggaggcgtaggttgtggtgagctaagatagtgccattgcactccagcctgggcaacaagagtgaaactctgtctcaaaaaaaaaaaaaaaaaaaaaaagaaaagaaaaagaaaacactctttgtcatcaaggggctgagttgtgcacgagggcagtcttgtcccccagcctatcctggggcaggggccatggttggtgtcctcacttaactgagagccaatagtcctagactgggtggggaaggtggagcctggtggccgtgtaggggaggggagttagggaccagcagggggttgtcccaagggctccctcaatgagccagtcatggatgtggcttgctctggtccggggtggaatggagggaggctgtggcaggagagaataatgggcccgcgctcaaatgagtggagattgaaatgggttcccacaggtaaagagaacagtgcccggcacccagtagggtctcaaacagccttgcttttctgtctacccatccatctttcaggcatctgtttattttcatggcgaggcttcatggggacgggaacaagtccttgatgagcgcctgccagagctgggcaggtgtgccctctgggctctgggaaggcagcacgtgggtgggttcagtctggtgtgggctgggagcccccatctccagctcacccagcaaagcatgaactgagcctgagggggttcccagctctccctagggactgactccccccaccccgccccccacaggatctggagaaccaaggcaggagaaagagaggctgcgtctgtgggggtggggcatggtggggagggctggctggagctgggcctggctgcctgcgatgggactcggcagtcctgggccccgcgggtgccagcgcctgtttgtgtgcctgtgtgtgccacccccgcagcccctccatcacacgtgtctcccggctgcctggagagctctttctacaaaatgtgaaaatgacagttgggctcacccacgcgcagaatcctcatgcagtcccgctccctcgctgccccttccaggtcaccatcggccctcaccctctctgcctagctgctgccccccgcccaccgcacccctcctttcccggcccctcccccaaccccctcttccctcctcctgctccttcccttggccccctcctccctccctgctctctgccagctcccccctccctctttcctccctccccctcaggtccccaaggtctctgtctctagctctaggtctctgtcacttttttgggtcactccccctcatctgaatttatgcttgagtaggagtgtgcatgtatgaggatgtccaagaagggagtgagtgtgtgtgtgcaggtgtgcagttgtgtgtgtatttgtgcttgtgtatgcgggtgtgtggttgtttgcatgtgtgtgactctgtgtgcaggtgtgtgactgggtgtgtgggtatgtggttgtgtgtatgtgtgactttttttggaggtgtgtgactgtgtgtgtgggtatgtggttgtgtacgtgtgtgtgactgtgatggtgtgtgactgtgtgcaggtgtgtggttgtgtgcctgtgtgtgtgtgtgcaagtgtgtgactgtgtgtgtgactgtgtgtgcaggtgtgtgattatgtgcgtgtgtgtgattgtgcaggtgtgtgtttgtgggtgtgtggttgtgtgcgtgtgtgactgtgtgcatgggtgtgactgtgggtgtgtggttgtgtgcatgtacgtgactctgtgtatgcaggtgtgtgactgtgcgtgtgtgcacacaggtatggaagtgtgtgtgcatgcgctccagcgggtgggggatggatggtggtggcatttcagggaacgaatggagctttcactcaatgactcttcaagcagcgggagggggtggcagcttcacaacagtcggacaggtttgtgcagcatgtaggaaaagccttcatttcctactgacagtggtgacatgggtggtgacaggtggagctggcagcagtgctgaagtcctggggtgggaggtgccaggggaagggtctggtgatggggggcagggggggtcatcctggaaatgcaggccgggcccatctcccagtcgccctcaaatgaggtttgctgtgcttccaccgtgaagggacctcagaggtctgcctcttgagggagatctgggaagacttcctgaaggaggcaaactgcctccaaagagctgcagggctagttgagcatggaagggatgtggggtgtggagccgtttggtgcaggagatgttcctcccactttcagaggctgctgtggaagctggggctgacatgggccacgggccaggaggatgcgctggggcaggagccacctggcacagcgctgggcacacagtgggagcccaacatctgtgctcccttcatgctctaagcccttgcccacatctgtcaccggcgccatttacagaggaggagacaagggccaccaaccccaggccacatgttggccaggtgtagctggagatccgactgctgtctttacttgccctgtccaggcagtagtgcgcaggtggctggagaatgctgtggcccgggccctggccccagctggcctccagcaccatccctcactctctctcctttctctgcaggatggtcgagtactccctggaccttcagaacatcaacctgtcagccatccgcaccgtgcgcgtcctgaggcccctcaaagccatcaaccgcgtgcccagtgagtcagccccgccctgtccacacattcctggctgatccatccctggccaacccatccctggcctacctagccaatgcccacccccccaccctgcttcgttcacttggagaagactgattagggcccgggtgtgctcagggatcctgcggtgtctatctagacagatgtgccctgctcccatagagctcatgggcctgaagacactggcaggtggtcccaatgcttctgagtcccaggagagtctggagagcatgctggggagtctggcttttcagggacgaagagtttatgggagagtggtcttcataggatgtcaaggcaagcacccataggaaaagaagttgcttagtttgaaggaggacgtcgtagagcatttcactggggcaatgaaacctgactccctcacttgtgctgactgacttagaagtcgagctctgtcattcacccaccacagatcgatgtacctactcacccatatgcctagccaccggttcatccatccacccgtccacctatccacctgtccatccatccatccatccgtccgtccgtccatccatccatccatccatccatctacctgtccacccatccacctgtctatccatccatccatccatccatccatccatccatccatccacccacccacccatccacccacccacctgtccacccacccacctgtccatccatctacctgtccacccatccacctgtccatccatccacccacccatccatccacccacccatccatccatccatccactcatccatccattcacccacccgtccatccatctacctgtccacccatccacctgtccatccatccatccatccatccatccatccatccatccatacgtacatacatacatctgctcatctttctagccatctttccatttgtccattcattcatctgtatagtcagccagacatccacctgtccatccactcatccacccatccacctgtccatccatccatctgtccacccacacatccatccacctgcccacccacctagtattaagagaggttatcttgcaaccataagccctgtagagttttcatgtccatgacctgttttgagccttacagtcattctgagggaggtgagctgttgccattttacagatgaaaaaactaagacttggagacacgaggttacctgcccagggacgcactgccagtgagtagcaaaggctggagtcagttaggtcttctgactcctcactgctctcttctaggaatggggtgaagactggggaaagagaggatgagggccctgcctgccttcctggtttttttttgttgttgttgtttgtttgtttgtttgtttgttttttttgagacacagcccgtagctctgttgcccagactggagtccagtggtgtgaacttggctcactgcaacttctgcctcccaggttcaagcaattctcctcctgtctcaccctcatgagtagctgggactacaggcatgtgccaccatgcctggctaatttttgtatttttagtagggatgaggtttcaccatattggtcaggctggtctcgaactcctgacctcaggtgatccacccaccttggcttcccaaagtgctaggattacaggcatgagccactgcacctggctgcctggggcttttatacgcatttacccacttcctatggtccaggaacttgacatctgatggctcaacaacctgtgggaggctcagagaagttaagtgactcacacaaagtcacacagcaattcagcggcagagctggaatctgaacagagttctgtctgtcctcagcccagtttatttcctggctgtgtctgaccccttgcttctcttccctgcctgagcttctgtttccccatctgccaaagagtacaggtctcctggcacctgctccccctccacaggtagtgctgtccccattcctttattcctagccctggggccttggggctctgtcacccaccccacccagccaacctctgtggtccatccatcctgagcgccctgtggggctggcctgaccccgggcttgcagaatgcatcagtcagtctgggcaggcctggcggggcaggagaggccatgcttcagaatatctgtggagcaaggtgaccaggagggtggcagagctttctgagcctggagggtggcccaatcctgctttgttctgagagggactggcttggcttgggtagggcacagagggggcctgggggctggggtctcaaggtcacaatacgatagaaaacgctgggggtcctcagtgctactgtgagggtcttggggaagggtttgggaggcgaggtagggcaagtgagtagtgggaaccaaagctgtgcgggagggggagggggagttcagctctaccagcctggccccttcccactgccctagggagacccccttgggcacagggaggggacatgcggagaggccattttagggccagcttctctctgtcctcatcccctccaatcccagagggctccttgaagatcacctagttcaaaaccatctttcccacatttaacaaatgaggaaactaaggtccagagagggtcgtggctagtccagggtcacacagcaattcagtgtgaccaaacagcagttcaggaaggaccaagccaaaccagcacaccttccccaacagtgtgtgattttctcccatgtgccccacctgactttactgggaaatgagccaaaaggtggcctccgtacactcagcacccagaactctgcctggcggacagaaggcgcgccaaagacacgtgtgaaatggacacagcaggtgtactgagctgtgtactgtgccaggaccacagagctatacatgctcctgtgccgggcatgaggaggcagggagaatggggctgggggtcgggaggcctccgggagaaggggatgtctgagttgagacccaggggaggatggggattgagtaggtggagggggagggctgggcggcagtagcgggggttcagggagtgtaaagggcttggggagggagctgcaggagctgggggttacaggctgggtggaccaaggggtggggcatgaggctggagaggacagggcctgggcatggaccatgtgcctgagggcagtgggagcataggaagaggttagcaagtggttgctttagaaacacccctggccagagtgcggtgtggggggggcggtggggggggcagtgggggtgagctggacatgggactgctcctggaacaggtgtgagcgaatggccggtactgggcaggggtgggggtgggatgcagagcagcaagtgggtgggagagggactgctgggcccagtccaggtcctccttgagtgtctggtgtgggcacctgggtgggcgggagggacctcagctctcaggggccagcacagagggccacgtcgctcctggctcccacccacagtgctgcttgtttctgtcctgggggacggcgggggctgccctcagcaggcagctgccatgggaccatggtcacactccaggccacggagcccacaggcaccgccaccttccagaggtgtgtgcacgttgcagagggtcgcacacaagggatgtttgtacgtgatcttgatctgaacctcttgtccggtctagggtctgcccagcagggggcagcactgtgatgggaccgctgaggctgcaggcgggcttaggggcatgggacgggacacgggcggaggcctcgctcttgccaggcgggcttctctacatctgtgtgagggtgtgtgtgggtgtgagggtgtgtgtgggtgtgagggtgtgtgtccaccagagaacacgtgtgaggacgtgtgtgcacgagtgtgtgtgcaatgaagggtgtgcacaggtgagtatgtgcctgtgaggtgcgtgtgcacatgtaagtacatgggagagtgtgtgtgcatgtgacaatgtgtgcatctgaggatgtgtgtgcacaagtgagcaaatgtgaaagcctgcacacgtgaatgggcacatgtaagggtgtgtacatgtgagagtgcgtgcctatgaaagtgtgtgtgttgtgagggtgtgtgctgtgtctgcctgggagggtgtctgtgtatgcctatgaatatgttcatgcctgagcatatgtgtgcttgtgtgtgtgtgcctgtgagggtgtgtgtgcctgtgagagtgtttgctgtgatgtgtgtgtgcctgtgagggtgtgtgtgcctgtgtgtgtgtgtgcctgtgtgtgtatgtgtgctgcgagggggtatgcctgtgaggggtgtgtggctgtgagggtgtgtgtgctgtgaggaggtgtgttatgaaagtatgcgtgcctgtgaacatgcgtgtgtctatgagcctatgtgtgcctgtgggggtgtgtatgtctgtgaaagggtgtgtacgtgtcaagagtgtgtgtgtgcctctgagcgtgtgtgcgtccataaaggggtgtgcctgtgagggtgtgtgtgtgtgaagtgtgtgtgtgcgcctgtgagggtgtatgtgtgacgtgtttgtgtgtgtgcctgtgagggtgtgtgtgaaagggtgtgtatgtgtcaagggtgtgtgtgcgcctctgaacgtgcgtgtgtccatgaaggggtgtgcctgtgagggtatgtgtgtgaagtgcatgtgtgtgcctgtgagggtgtgtttgtgagagcgcgtgtgtgaagagtgtgtatgtctctgtgagggtgtgtgtatgaagagtgtgtgtgtagcgagcatgtgtgtgcctgtgagggtgtgtgtgtgtgaagagcgtgcgtgcgccttgcacgtgtgtgtgggcgcctgtgcctctccctccaggtcctctttgctcctcctggttcctctcctgctgtgtggggagttcattaagctgctccccggaggtggaggacactcccggtccccagcaccagcctgccctggcctctgggaaggcagggattgaccctgtgcccaacatccccctgcgctccaattacagaggagctccgagcgggctccgagcctttcctcagggtctcctcctgctagtggccaccgctgggcagttgggggagtgtcggcttcccgcccctgagcctgattccgcttctcagaggacagcctggttctctcagaaccagcactggggagttactgggagcactggccctccagcagctggtgttcccctggaagggccctgcagatactcacaggcgattctgcgggagccgcaggctgttggagcacgtggggcttaaagtccattggtctaaccctcatttcgcgggacagacagttttgtcctcaggtgccaggtcccctgcccagagccaccaggggattagtgacttgaggtggggaaggggtggctcaggctctcagaagtgcttcctagagagatttcatagttgcctggtttttttattttcttttttttaaaatatgattttcctgcagacatttctcctacttatggtttgagctgcttctgccctgggacacagtcttttttttttttttttttgagacagcatctagccctgtcacccaggctggagtgcagtggcatgatcttggctcactgcaacctccacctcccggttcaagagattctcctgcctcagtctcccgagtagctgggattacaggtgcccaccaccacgtccagctaatttttgtatttttagtagagacggggtttcactgtgttggccaggctggtctccaactcctgaccttgtgatccacccgtctcggtctcccaaagtgctgggattacaagcgtgagccaccgtgcccagccgggacacagtcttttcaacagtagcccgtagcttttagtctcatttctagagggcaagctagagagctggtgatgggcgcagtcaaatgacgggttattaattgcaaagccatgaggagtgggctggttgcctgcggtttaaaaatacagcaaaggctgcaaagctccagcatgaacaaccaggaagatgcaagtgtgggtcagagaataaaagttctggtcttagctctgccatatgcctgctgtgtgacctgagaagtcccttggcatctctgggcctcggtttccctactcgtacaaacaaagcaggaggataaactggattaaatacgtggctctcaactttgtccaggatgagcgggggacatggacatcatggtgctgcttacagaatcgtataaaatacatgtctctccaccccacccctgcaggtccttgttcaggccactcagcctctgatggataaagagaggaagacagcagagaggtggttggggagggaggaaggaagcgccaaattaggagttgggagtctgggttctggttcctctctgtgtgacctttcctaagtcaccgcctctctctgggccttggcaagatggggctgaattatctctaaatgtgcccccgccccaccccacccccagcctgtacatctctcaaggcactgccttgcttccttaagcatactgcctgagtcatttacatatgaaaagtgctgttttctccagtaagaaacgagggcagtcactgccaaggcctggccagagaggtgatagttcccccgacccaggctgtggcgcaggggcgaggcagaccctggggagctcaggggcagccctgagcccgagctcacagtccctgacaatgctgtggggaaggctgccatcccctcggctgcacaaccagctggaggtttgctctgtgctgtcaggccaggttctggtcccagggcctccacccactggctgtgggaccctgagtaagccacgtgcctctccgtgcctctatttccccagctctcaagagaagttaataatacccatgtccatctggttaggaaggctgaaatgccaccgtgggtgtagagagctgcgtgcacagcctcgtgtgcctacgcgatccgcaggtgctgctgctagataaggtgctgggagtagtgagggtggacgtagagtgtcagggacgtcttctcaggggctggttttggaagacactcatcagctgagggttggagagggtgtgcctggcagatagattggcatgtgcaaaggtggagtggaggtgtcatcctgggctgggcatcgtgtgggtgggcaggggactgcgtggcgggaaaaggagagggttgttcacatcttctagggagttaattataatcataagtggctaaagtttttttttttctttgagacggagtcttgctctgttgccaggctggagtgcagtggcgtgatctcggctcactgcaacctccgcctcctgggttcaagcgattctcctgcctcagcctcctgagtagctgggactacaggcgtgtgccaccacacccagctaatttttgtatttttagtagagacggggtttcaccatgttggccaggatggtcttgatctctggaccttgagatccgcctgataagtggctaaagtttatcaagtgcttgtgacaagctcatcacagtgctttacatgggcagtgtcatttcatcttcactacagctttaggaagttagtggcattgtgacacctactttctagatggggaagcaggcagaggggttgactagtctgcccaagaccacacagctggctggggacagagctagggtttgaacccgtgttcacctgaccctacagcttttcactctgtgtcagtatctcctttccgttcttttagcgtgtaggcgccagacacccactcccgtccccagtgtctgcaggacatcaggaaacacccctgcccacttccagggtcaaaggagagaggtcccgtgggctgcagtgacacctcgaggccctctctccttccatctcccccctcagcctggtctgctccagacctctgagtgcctttcactgttggggtgcacaggtctcgtggtgctgatcccctttcgggctgaagccacgaggcaggcggggggccagggcagaggagggagagcatcagccgcacagtctgcaggatcctgtgcagacgcccctgtggacagcgccccgaacggcacacacatctctgaaagggggccgggcaggatggcactgtggttagtgcacagcgggtgccaaccctcacgccccaggccaagccctttcctgcccaggtgcctgcccaaccagggtcatggtcaggccagccctgctgaagaggggcgaggaaggcctcaggattccttcttggaagggccttggggggcatttgttggacagttctgagagatgcaccttgaaatagttggcgtggaagtgtcggcattttcgcctgaagcatgtgtttactctcggcttggggagagcagaaggaaagctactgggctgtcagcccccaccaggccacaccttggacttcagggctgtctgttttaggcacccacaaggggctcccacttcatcctgagggagaaaggcctgacagcccccatggggaaggaagagagggaaggagggagagaaatggggagatgaaatgaggggggccagtttccccagggctgctcccttcctggaagaggtggggctgggtgggtgggagaacatctggccagagcatctggcgagcgctggatttgggaacaggaaagagcagcctggaccctgcagggagaagtgcttgggggtggggcagggcaaaggcagtgcctccctctccccctccctcaggtcgagttctgcattctgttctacaaatccggagggagggagtgtcctggacaggccaccagatcaaaggactgggccactgtgtggattaactgactcatggatcgattccatcattcatccaaagtaaaatccaccgggggttctctgggcgagaccctggccagatgtggggccaagatcaggcacagccccttccccaaaggctgacagctgcaggccagtgggacgcctgatctgatcggggcaggggctgatgggaaagggtgcctacctggtctaggaggaggcttcccagaggagggggtggtaggacacttgaaggatgcctaggagtggtttggggcacagcaggtggggggaccttcagtgagacagccgggccagcccccgagggtgtgagcgcagccagctctgggagggacctgaggcctctcctgggatgggggaagtgagctgctggctggctgaggttggcttcctttctcagcagtgggcaccaaggccctccaccagcccacaggcccctccctggctgggccttgggccggcagctgtgaccccggcaagctggctgtctgctgcctggccaggcctcttggtgcccactgtgctcctgattagttggcgccggcaatggcaggagcagcagacggcctctcccagccgcccagcccctttactgacctggccagtccagggagagtggcccccagtggccaggccacagcctcggctcccctcgccccgactccactcttctgggccacgggctgtgccctggcagaggctggcacgcgtctggcaatttctacttgagctggcctggctggactgatctgggctgacagctcccctctgccaagaacaccccaaacctccaggggtgatgcctgtcaggaagtgcttcctgttcttcctgccacctcctctcaggtgtccccactgccactgaggggctgcctctgcctggctgctgcccaggttctctcaagcagaggctctagcctaggggtccccaaaaagggtgagcagctccatccacttgcccgctgccatctgccaccaccaagcccctagctttcagtgctgtctagagaccgtcctcaccctggtgctccacatgacgctcccgggccagactgttctcccctgaactccagaccccaagatctggcaaagcgactccatggggatgtaccccggccatcccaagctccacatctccagatggagccccacccccgctgaaggccgctctgtggctccaggccccaaaccttggagtcgtccccaactgccctcttcctcctacatccatatcccatccctctgcttggcctccaaaatacctccagaatccaccatgttccccactccactgccatcattatctgggcccagccccaccatcttccggtttatcacaatgatgaatgtatgacggccaggcagggccaggcaggacggagaggagcagggggacggaaggcccaatcatcaggccgtgagggtggtggagagggcccagtgtctggcctgggccatctcaacagtgagggcacagagcagggaaccacagctctcctgggccccacactcagcgctccggtttctgtcccacgtgagacccccgggaggcagcgaccacacagctgtggagcccacaggcctgaccccctttcagagatgtgtatgccgttcggggcgctgtccacaggggcgtctgcacaggatcctgcagactgtgcggctgatgctctctctcctctgccctggccccccgcgatccattctccacccagcagcccagcaatcctctcaccccttccccagatcacgtctcccttctgctccatgaccctttggagaagctcaagtcttccagccccctggccctgtctcctccccagcctcatccctgctcagcttccccccagccgcatggtctccttgctgtggctgtggctgtgcttgactccctcccgcctctaggcctttgtccaggctgcctccgacttgagggctgtcccccagacagcgacagcccctcagctgactctgccaccccttccctgtctctgctcagcatcatcctgcctttcctggccccctatttaatgttcacccgaccccaggccaaacccccaaccctttctcccttctctgttttgttttcatagcacttttcacccaacgaacgaggacgtgaccttgtgtatcacccatgtggtttatttattatttatttattgcctgcttttccctaccgtacctgggatgtgagcctcacgaggacagggaactctgttttggtttttcacaactcatgtatccctagagcctagcacagtgcccggcacggagccagccctcattcagtacttgctgagtggctccattcactcgcccaccgctcctttactcattcaagctgtcggccttcaagggactgctttgtgcccggtcctggtctggatgggagaacacagagcagccgccttggccttgggcgcagagcatgcctggtttccagcggggaggaggaggcagagccgggaactggcacaggctatgatggagggcgggtgggcagcagtaactcatggcagagacaccagacaaggcgaccgctcagctgagatccccaaaaaggaggtgagggatggccctccaagcatgtgcaagggcacggaggcagccccgaaagtgggctttccagcactggaagtggatctttctggctgggtgcagcacagcagttccgggatcctatggcagggtggaggaggtgtcgtgggtgggggcagagtgtgtgcagggctggggagtggggatgctgggagctgccagtcaggctggtgccgcaggttcaggtgtggcagggaggatggagggaggtggggccagactcgggaggagtctgtgagcaggggccaggaaggtgggggataaggatttgcactttcccatggggcgtatgggctgttggaggcttctgacttcagggaatcttccgtcagaggtgtcctggccccgtggtattcctgaagggctggctggacaggagccactgtcccctctgtagatgaggccactggggcccagagaaggcaagctttgcctcaaggccaccctactgggactgggaccagatctcatgtcctgggtctgtgctctgggcgctcaccgggctgggggctgcatcaggtgtcctgaggactccagggtcctcttcccctttttagctggggagccagggccctcaatcacactcatggggctgcctgtagcctgtccccatcatggcccatctggctcttgctccaggcagaaggcctgaaaaggtgcactaagaacacagaaccaggtaagcccatcctgacagtgactgagcgccttggggcaatgagaggcaggagggcttcgtgactaactgggggtgagaatcagggaggactgcctggaggaggagggtttggccgggggaaggtgtggtgggagatgaagtagaaaggatggtttgaggcagatggtgacttgcaggcagcctctccgctctttctctctgtcttctgtctctctttctgtcactcctggtttcactttctcctctgtctgcttttctctcttctctccttgcctccacctcctgtgccagtctccagaggcactgagggcagagtgtaactggccaacctgtcttggctaattacttgactgtgggcatgaaaggaagattagccatagtctcttggggtcctccctgaatccctaatcctgtggcccctcttccctggcaaggaagggataaagtagttctaagtccttaattagctaattatgccagggctctgtggccctgggactccctgggccccagggagggctgtgaagtgcgctggggcccagctgggcagagtgaggcgggtcggggaggagggacggggctgccattcagggaagccagccggataggtttgcaggagccttttggaatttcaatatcccagagaacaagggagatgtaattaattgagcgacaaaggccggcccgagggagaagcaggagcgggaatgaagcagccaggctgggaccgtgtggagctgccttctccaggcccttctcatccagcctcttctccagctgctaccggccctctgtgcttgcctcctgcccctgtcctggcctcggggctcgcccattcttttttgaagctcagagctgatcgagggttctgcttgcttagaaatatgccagcagacctccttgcccagccacccagcacagagccccacactcctcagagccccctgcaaccgccttcaggaatagtgcctttgcccatgccagtccctctgctggccaaggcttcgcatcctggagtccagctcagcaaatgtgcccggagcggccccactccccagacacagtcctttggctcaacacttggtcccctgtccccttgctgccaggctgtgagctctgtgtgtgtgtggggggagggttgggggggtaaaaaatgggtcttgtttgtctttggattccccatgtgcccaacgccatgcctggcatgcagctggcatttactatgtgtttcatgaatgaatgagtgagtgaatgaatgaatgaatgaatgaacgatggggcaccagaaaggcctgcagttggcctacttgagtcagggaatccatttggatggattatgagggcacccattctatttctcccttccctctgctgtacacgcctcgcttccctgcttgggggtgtagggtggtggggagctgagcctcaccctggcctgctctcggtggggtgaagcagcctgcaggcaagctccactgtctttcctgagaggaggctgacctagttttgtggagagggaagatggggtgggccttaattattgattggaaatcactgcacacagagtttgtgacgcaaattccaaataattatcctcattaataagcacctcaggctcacccctagcatacacaaccatctggacagggccactgttctacttgtcaccatccttccatcttcctctctccaatcttccactccctccccatgacttatcacatcattcattcatgagtagtcattgaacaaatgttaggtgagcctgtcttctgggccaggacctgctgggttctgggaatactgaggtgacttagacaagggccctgcccccagaaccttatagcctagtggaagagataggaaagtaaacagacaactatacattagggctagaataagacgagatattgatatggatggaacctcctaggttgtgcagtatacaacctgcacaactgtacgtggcagcctaggctaggtcagaggtgctgagattgcccagagcagaagagagaaggatgaactctacctgggatgatgtaagagtctggaagccttcacagaaagagctttcacagggctgcggtggctgaatagggatttgccaggcagaagagaggagcaagggtgttctaggaagagggaacagcagggataaaagcatggaggtgtgaaatctcacagtatgtttagggaacttcaaataatttggcactgcaaggcagtagactgcaaattgagagaggtatgaaactagagaggtgggcagtatggactctacaggatcttagggggagggtgtgtactcaaaggtgccccaccagctcttcaccttctttggggccatggactcctgtgtgggccttctctgtagagcccgttagcaggcgcttggctcttctgaagttggctctgggggctctgcctggttccatcatgcagtgggagtggtagttctggctggtactgctgtgtcctgacatggtcaaggggaacagtgactgtctcagagacaaagggtattcaggacacattcattgggcacgtactacaaccactctgcaggtgctgggcatactaaggtgaaccagcctcagtcccaaggcctctgggacaagggggttgtgaaaagacagctagactttgtgtcaagacacctggtttaaatctagaccctgctgcttctgagctgtgtgacctacggcaagcagtttcagttctttgagtctccagttgccttctctataaaatagaaataagagtaccaacctcacagagttgttgtgaagactgaagatcacatttgtgcaagtacgcagaagaacacttggtacataaaaggtgctgcataaatgcttgcttgttcattcacaatctagtgtaagtggagcagggcccagagccatttccatggctttttcggtggaggggcagataaaaaggagagggtgtatctggcagccactgaacaggatgggaacagcaaggagcccctgataatgcatccccctccccctccctgtttctctaaccttgctctcactctttcgtctctgggacctctgctccctgtctgaccatccctccaccttttcccctcccaggtatgcggatcctggtgaacctgctcctggacacactgcccatgctggggaatgtcctgctgctctgcttctttgtcttcttcatctttggcatcataggtgtgcagctctgggcgggcctgctgcgtaaccgctgcttcctggaggagaacttcaccatgtgagttcatcccctgccacccatgcagctccggggactcttactaagacacagttttaaccttctgggtcattgggaatcaggaccaatggggtagaagcagcaaaaaaagagaggtcaggtaggaggggaaagggaagttaagacacaagcagaagtgatgcccaggaggaaaaagaagacagaaaacctgaagagcaggcacagaacttggctctccgcccacagcacattcattccccttggtggctgagtcatccaggaagggtgagctcccatttggccgcttgtgtatgaaagcagggggcgagacattcctccgagagaggattattgacacacaaatcaagctctggatcttggaggagctgggcttagttgtctgaaaaattggacacctatagaacccgtgcttccgtagtggtgggggataagtgtgcacacacatgtacctgcgtgtatgtgtttggatgtgaatatgcattcatttcagatatgcatggcgtgcaccgactaagtgccaggccccagggagtcagaaataggagagcatcttcatccatgttctcacttccctttgttgagcctgtgctcggggctcaggatgcggcagaagggggggggtccctgccccctgcccttgagaagcgcagggctgggagccgatcccaaacacctctagtgagtgcctctcagtctgttaatcatggaccgaggtgactgtaggaagcgtggggacgtggggacactgtacaggtgagggctagtttctccctcccggcctggttggggagagggtagcagagctggagggtgaaagttgggtaggaactggcccatccacccatcgctgtgggggaacagtagggtacctgggtagaccacagcaggggcaccttggtgggtaaaggccccaagtggggattcaggaagggggtctacacttgtgcccatccccagaagaggcaggtcctgaggcagggcctggggcagtggggctggggagaggcagctgcttcgaagtcagggtagtgtgagctccgcccctctgtcccacagggctctttccctggatccttctgtggccagccccttcttattatgtgggctcagcccacctgacacctcctcctagaggccttccctcgccctccctcaccaccccagccccaagctcgccatcacacagccctgctgggttttcttcttgactcatctctctgaaatcatctcctgtcggttcatccgaggtctctggaggcccctgaaatgtgagttctctaccacagcaggggcacctggggcttaactcctcccaggcctagagcagggcttggcacaggtgctcccaactaattgttgaaggaataagtgagtaagtggatgtgtgagtgcatttaccacccagaggcaggctgggagcgagaaccagttcttcctaggcctggcgtgttggagactctgcgtcccgttccctgatgtctcctcctctgtggtcttccccaggccccatgagatggccccagccctgtctcggctgcaaaaggagagttggagggaggatgctgaggatgtgcttgggctgtgttaaagaggaaccttatctggtccacccccatccccgccccaggaagggaataataaatacaaggaaatgtccctggagaaagaacgccctaagggaagatgctgggtgattgccacgcctccctctgagctcctggcttcattctcttagggtgggtgttattaactcacatgccctattgggctgggggatggtcggtgttgcgtgaaaaaggagatgagtaaagttcacgcacgtctggtggagagcaaggccagggtcatcccaggcctgtgactcctgtagaaataagggaggcttagaccttaactcacaaggcttgtttagggcagggagcagagaagttggtaaccagggttcacaaagaggcagcaagatctcttctgggtgatcagaaagctggaatttgagaagatcctagctaggatcttggggaaccaggcagttgggcaggggaattcctcaaagtcctcttttcgggctctccccagccgggctgttgcctggaagcctctagctcctggcacagtgggccctgtgagatggacagagctccgtcgtcagggcggagaagggcccttcctggggcgtaacacgcacaggtgggagatggggccactgaaagcctcagcccaacctgtcactatgcagatggggactgaggcctagatgggaagggactcacccagggccaacagcaaggcttccagcaagcatccagcctctccctggctgtgtgggtgtcaggacactgtcattccacaaacactcaccgaccccttccaggggccagggcctatgctgggccctggggatgcagagaccctttatcttggccactgccctctgtactgtctcactggggaactgcatgtgttgaaaattaggcctcaggatgctctgggcttggcagagtggggcctggaagcccagagcgggtacaagaccagccagggtggggaccaatggggcttctcgcttcacagaggaccagtgggacttcttgcttctcagaggatgtgaacttgagctgaacctaaaagattcaagaaaaatgtctccaggcagatggggggacagggagtaggtggggagggtactcttgatcgaggcaaccccactgctgcggtgtggcgtgtgggttagaaatcggagccccagcctggcgttcagggtcaaatcctgcctctgtcacttggcagcactcctgtgtatttacccaaaaaagggatggcttatatatacccaaagatgtgtacaagaatatttatgagtcataagagccaaaaaaccagaaacaaccccaaaccattggcagaatgaataaataagtggcagtgtactcactcagcggaatactcacagacatgaaaaagaaggaattacattttgctctcttaacggtgtcttttgatgaatgaatctcttagttgtaatgaagtccagtttatcaatcatttttttagcattgttttttgtgtcctgtttaagaaatcttttctaaaggttgtgaaaatatcttccagtgctttcttttaggaacttacttttttaaaaagaaaaatcctttacatgtaggtctgacgtccaaatctagctttgtgtatggtttgtagatggagtcaagattttttttttttaggtgaaatctcactctatcgcctaggctggagtgcagtggcatgatctcagctcactgccacctccgcctcccaggttcaagtgattctcctgcctcagcctcctgagtagctgggattacagacgcatgccaccacgctattaaatggctaatttttgtattgttagtagagatggggttttgccatgttggccaagctggtctcgaactcctgacctcaagcgatccacccacctcggcctcccaaagtgctgggattacaggcgtgagccactgcgcctggccccagttggggtcaagatttattgatttatttttagtggatagtcaactgtcccaggaccagtggtggaaaagtctgtcctttctccactgaattgcaggggtgcctgtatgagactcaggtgaccatatgtatttgggttggatgtgtacattttgattattgatggatgtgccaaattgccctctaagaaggttgtaccaatgtatactcccacaacagtgtatgtgagtgtctgtttacacttattctttcccatgctgaatattaccaaccatgaaatgtttgccatttgggtaggtgtaaaatgatctcattattttttgtttgcatttggttattttgttccattggtgagtgtttcttcctatatattggccattttttatttcttctgtgaatttttctgttcttatcttttgtcttttttttccccctagtgggttatttttccttttccttattaagttatgggagattttcatatgctttagatcagcagtccccaacctttttggcaccagggaccagtttcgtggaagataatttttccatggaccagagcaaggggatggttttgggatgaaactgttccacctcagatcatcaggcaatagattctcataaggagtgcacaacctagatctcttgagtgtgaagttcacaatagggttcgtgctcctatgagaatctaatgctaccactgatctgacagaaggtggagctcaggcagtaatgctcccttgctggacactcacctcctgctgtgtggccccggggtttggggacccctgctttagatagttacctcttatctcctttgtatgttgcgaatacttaatcccattcaacagcaaactatggcctgttttggtaaataaagttttattgaaacagctatccccacttgtttatctatttcctataactgtttgcagattacaatggcaaagttgagtcattgggacagaggccatgtgctctgcagaaaaatatttgctaatacaggccattacacaaaaagtttgcctacctctgctttatcccaatttgttgcttgtctttttactttgtatattttgtctcagtgaaattttacattagtatgtagtcaatctggtcgaacttttcctttacaaaacttggattttttgtcttagccaggatggttatacctatcctgagttaacaaaaaatattccatattttcttataacgtttttgtggtgatgttcattgcatttatgctttttaatccactggaagtttactgtttttagttttataatatatcttacttaatctaatatattcaaatattatttttagtgtgcaatcaatataacaattaaaaatgagatgatttatatgtctatttttggataccaggtcttcaaaaagtttatttttgtgtatggtgtgaggttgggatccaactattatttcccaaatagatagcaactatcctaacaccacttactgatgggtccctcctttctctgcaggtctgaaaagccatctctgtgatatactaagttctcctttgtacatgggtttgtctttgtgctctatggcattccattaacctttctgttcctgtcacagtgctacactgtattaacaatcatagttgtacagtattttgctctcttatagatctggtttctgtttatctctctcctttttaaagcttgtcttgactattttcccatccaaataaatcctagaaccatctgggcaggctccacggccaaaatgttgggatttttgattaggattgcaatgaagcatagattaacccttctggatggtcatagtagggattgttgtctgttttatagatgaggaaatcaaagtccagagaagggcagcccggctcggtggctcacacctgtaatcccagcactttgggaggctgaggtgggtggatcacctgaggtcaggagtttgagaacaggctgaccaatatggtgaaaccccatctctactaaaaaaacaaaaattagctaggtatggtggtgtgcacctatagtcctatctactcaggaggctgagacaggagaattgcttgaacccaggaggtggaggttgcagtgagccaagatctcaccactgcactccagcctgggtgacagagtgagactcggtctaaaaaagaaaaaaaagaaacgaagtctagagagaggaagtgatcagcccaggatcacttacatggaagtgggtggagcagatggaggatctacctgtcatctgctagatcggtaaaagccagtgcttgtttactgaccacctgctctgtctgtgcgaacccaacagtgtgtgtggcctggggatgctgagatgtccagactcccgagggagttgagggcatctcccccaggagccataatgaaggtgtgtgcaaggcacagtgaggctccccagagaaggggaccacagtgggccagtgggggttttcatggccataacagaggtggggaagggtgaccaaggcaggggaacagcatgtgccaaggcctggaggcagtgacaaggccatcctgctatgctgcatggcctctcccttcctgatcctcctgacagtgacccctcccctttccctcttttacccaccctcgcctgtggacagacaaggggatgtggccttgcccccatactaccagccggaggaggatgatgagatgcccttcatctgctccctgtcgggcgacaatgggataatgggctgccatgagatccccccgctcaaggagcagggccgtgagtgctgcctgtccaaggacgacgtctacgactttggggcggggcgccaggacctcaatgccagcggcctctgtgtcaactggaaccgttactacaatgtgtgccgcacgggcagcgccaacccccacaagggtgccatcaactttgacaacatcggttatgcttggattgtcatcttccaggtgaggccattcaggcctggggccagcctggtcctagagtgggcagctctgcctggtgggcagggctctgtgctaggcatttgccagccctcatctcactgaaacctgcccagcttgctggcagaataggcattatcatgcccattttatagacagagaacccaaggttcaaagaaaggaagcaagctaattgaccacagatgatgtgactattaaatggcaaaaataggctcttaacccagctctgggtgtccccaaagcctgagctctttgcagagcctcaggctgccttgggccctatggatcccagcagggagggctgttcagagaggagaggcaggattcaagctctgttggagggattggctgaccaaggccaggatcatggggtaggaggacattcctggtggggacagcctgagcaaaattctggtacagggagtgccaagtagctcatctggagtcagaaagaaatgtgtctcgccttgtcacccagtgcacataatgcacacaggttcacaaagcagcactagcctcatggcgtgcaaagggcttgttgcgtggccccactgcactgactgtcagcctatactctgcagaggatgggctgggatatgtgtagggaaagaactagggcagtggaccttggccagtattgcttggcctctctgtgcctcagttttcccatctttaaaatggggtaataacagcccccctcaccttgggtcattgttaagaataaagcagatggcacgctcagggcagccagccctgtgtacagagtgctgggtagaggttacctttctgctgtcctcagaaagaaggggcaggagcagacagagggggagctgagaagtccctgagggggcagcgggagggctgaactctgctgcctccgctgccctgcgctgcctctgctgccctgtgctgccctctgctgccctgggcactttgccctggggagcatcagggtcatttgttcagagatgcagggtgtgaggtgacggcaacagctgtgttttggaaccctctgcccaggagggtgggtggccgctcagggggtcccactctgtgcatttgccagaagccaacaaggacccagggtttgtctttctcaaggctgctccatcccccagtctgggaaggagttggggtggggtggggggtgacaaagtcacaccagcctcattgcggtgtgcactcccaggctccaccgagctgcaccccagctctgccaggtgggctccccacatacagaagaagcggctgagactcaaagagggtgggtggcccagctgataagctggagcaggggcaggctccctgcttttccagccctcccgctggtgtggtagactggagggaccaaggttcaagtcctggcacgtccccttcctggctgtgtgacagtgggcaagtgctttcccctcactgagcctcagtttcctcacctgtataatgtgatgtgccttgtccagcccctgtgagacagactcgaggcagcatgtgtgatgcgttctggcacacagtggggcctctgtctggggcactgcctgggctacgggctttctgatgggccagtcctctcggctctctctcctctgcgcgctgcaggtgatcactctggaaggctgggtggagatcatgtactacgtgatggatgctcactccttctacaacttcatctacttcatcctgcttatcatagtaagtgtcagggagcctgggctcctaggtgtgctcagaacccatggaccaggggacctgaggagggagggtctttgggagtccctagggagcccctcagagccaggacagccgggatgagggagcaggaagggctgtttctcagcaccaccgggcagcagatgattgaaggggctcatcaggggcggctgtcgggagcatccaacaccttcgattgctgtcatttctcatgtgtgggcacttacttccccaccgatgctctgctcctgtttctctgcctcgtgtctctgggctacattctttgcatgacctgagtccaaggagcagcctcagactggaagcttcagaagggctccagctcattcctgttttcctggacggagaagacaagatgcccggagactgagcagggtttggagggaggtcgcctgatagtgacccggtggagctccctggaattctcagagggactcccatctcttgggcagccctgccttgttggggtaacctggagatggaggtgggctcaccctcctcttcctggccagcccctcttgcctgcacccccatatggtcttcccagagtgagctcatccacctcgtcatgcctgactgcagcttcagcacagcacagtccccaaaatgtcaaggtgattcattcccaggagtcgctgctgaatccctgctgctgcgaggttgggttctctggcttcctggtggtgggagagggcacgcttggccctccagggcagtgccccatcctgggctggcaggaccttgacctggggccccagaacagaccagcaggtgacctgagacacctgctgttgtctaagctccagtgctttcttggggaggctggggccttggacctatagaagatgccccaggtaaaaggagaggggccagattttattcagcattgccatccatggccttgcatattcactcaccagaacattcaggaaacccacactgcaccaggccctgagccaagtgctaggaacagagcagtgagtaaggcccagcccctgtcctcgaggagctcacaggctcgtggggaagatgggctgacagcagtctgaccatacagcaccttaggtgccatgatagaagggagcccagagaaggctcccgatccagcctggaggagggatggggaggtgggaggcttcctggaggaggtgatgccagaattgagccttaaagactcagggaggtgagcagggaaagagcctcttgggcaggggtggctcacagagcccctgaagctggccaggatcctgcagtgtgggagccacaagcccctggggttgcaagaggagtctccagttcccgggaggggctggaggatgctccatctgctctcgctgtggggttaagggtggctaagggtacagttggggtaaagcacgatgctccccgagctcattgtgaaatgggggacagtgacagcaccttgctcctgggctctcaggagggttaggtgagacagagcctgaagcctgcatgtccttggcacacagtgagtactcagtacatgtgccctgctactattattgctgctattattgggtctcaggtggccctgtcacaggacgatgagtgctggcgagaggctgaaagggctgagttttttcagacactgggaagggtccagagagcaaagtcaggacaaatgcactgctatgtcacctgcagggtcacctcctgtgaggaccctgaaccccagaaaggtgaggggtccttggccttcaagcccaggccctagtgctccttctttaaattttctttcttttttttttttttaattttagagacaaggtctggctctgttgcccaggctggagtgctgtggtgcaatcatagctcgctgcagccttgatctcctgggctcaagcgatcatcccccctcagcttcctgagtagctgggactataggcatgcaccaccatgcctggctaatgtttaaatttttttttgagacagtgtcttgctatatttgccaggctggtctcaaactcctggactcaagtgatcctcctgccttggcttcccaaagcactgggattacaggcatgagccgcagcccccggcccccagtgcttttttttaagacggagtcttgctcttgttgcccagcctggagtgcaatggcctgatcttggctcactgcaacctctgccttccgggttcaagtgattctcctacctcagcttcctgagtagctgggattacaggcatgcaccaccatgcccggctaatttttgtatttttagtagagacaggatttcatgatgttggccaggctggtctcgaactcctgacttcaagtgatccacccacttcagcctcccaaagtgctgggattacaggcatgagccaccgcacctggcttccttctgactaaaaaagttcttggctcatcaggtttgagcctcctattttacagatggggaagtggaggccaggaggggatggaggcccacccgggtcgcccagggcagcagctgcagaggcaggggcgggtaggagcctgacaagcgtgtggtcccagagggcagggcccagctgtctcttcctgtgactctcacacaggcctggtgcagggaggctccccaggaaatgcttgtggacaaggtgactgagacaaggatgggatgccatcttcttacccgagaggcaggggattttcccagagtcctctgggccagcaaccctcccagactctagctcctcagtcatcactgatgaggctgcagccatggagaacctcctggcgggcacctccaagggggatgaaagctatctgctcaggctggccggcagccaagttcactcccaggctcagcaaatgctggggagggggctgcgccctgaaagcctggaaactggagaggagccccactcgtggagccctcgggccacaaggagatgggatccccaatgccaaccagggcagcctctcccccttcatttcatgcaagcacagataaagccacatgaaaaccccaaggcagcttctcttttctcatctggggtcccagctgaggccagattctggtcagagagaaggcagggctgggcaaggactcagggcctgggaagcccacgacgggctgtggcctccctctctgggctcagtgcagatgtcccaggcggatgggggctaggccagggcctaggggtctgaggggagctgggctttgaagcagattccggtcgggcccagggagctgcctgggccgtcgctttctcctggagcgaggcctcagcgatcttttcctgtccccatctgtgtctgtgcctgtgtctctctgggcccctccacctcccctgcccttttctttccctgtttccactcgtcccctgcatctcccctcccttgcatctgtcttttctgagcccgtcttactctctttgtcatcgcgtctctgtacctcactgtctctttctacctgcccttgctctggcctctgtgtctccggttggtccctgcccctcctccttgcttcatttctgcctctgtaccgccatctccatctccatctccccatctccctctgcctccctctccccatgtctccctgctgtccccactccatgactctgcctctctcacccttctgtcccctccatccctgtccctgtccctgtcctctcctcccgttggtcacaggtgggctccttcttcatgatcaacctgtgcctcgttgtcatagcgacccagttctcggagaccaagcaacgggagcaccggctgatgctggagcagcggcagcgctacctgtcctccagcacggtggccagctacgccgagcctggcgactgctacgaggagatcttccagtatgtctgccacatcctgcgcaaggccaagcgccgcgccctgggcctctaccaggccctgcagagccggcgccaggccctgggcccggaggccccggcccccgccaaacctgggccccacgccaaggagccccggcactaccgtaagtggccctgcatccgacgcggcactcaggcacttcgtgccaagtgtcactcctttccagcacgtccagcaggcccagcagcctccaaattccaggtcttcacttcatgctcaagtgtttccttcacagcccccagggacctctgtccccacctctgcctgccctctcctggcacctgtcagagcctgcgctgggccgggcctggggctgagggaactcagcctttgccctggaggaactcgatccctgtgtatgtgtggagatagcagatcggcctcggaggaagccacacttgagaggaaagaacaagtgtctctcctcagtctcggaaagctaaaattcttcccccccactgcagccacatcactcccttctctgggttcctgctgctgtcccctgctttccagcacacctgagcaatgaccctgggtacctgacacaaaggggctgtgggcctgcccctcaaagctgtggcatgttggggactcatgccaccctgtgctctgtgcttgtcgtggggctgtgagagttacacttttgttttttgttgttgttgttaagacagggtcacccagggagtacagtgacacaaacacagcttactgcaacctcaaactcctaggcttaagccatcctcctgcctcagccttcggagtagctgggactacaggcatgcaccaccatgcccggctaattttttaatttttttttgtaaagacgggtctccctatgttgcccaggctggtctcaaactcctgggctcacgtgatcctcccgccttggcctcccaaagtgctaggattataggcatgagccaccgcccctggccaagtttatgcttttaggcttggaaggggctgccctgttggttgcctcatctgttccaggaaacggtcctgagaagggagaagatagtaatattatctccacttttcagatgggaagactaagggtcagggagatgaagggagacatctcggaagccggcattgccagactttgcatgggcctgcctcccctggaaatgatcactcgggaagaggcaagccagggccacgggaggtgggccctgcccccagccccaataccacttctcccagttggtgctgagaaggaagtcggcaggcatggggacggcgcttgagcagccgcgaccctctgcaggcctgtctccctctataaagtgaggacaggggcccccagcacgtggccgtccacggcgggagtcagccaccccaggccctgctctggaaagccctgtccttccagctctcacagtctgggaatcgattcttgggaggcaagcagaagaatgcacgctcagagctgccgcccacccgtcctcgggtgccagccatccaggcgtgggctcggaggaggccccaggtggcccgtgggcaggcccggcatgcggacacaggagctggggccgggcaaggctggcactggtgttgctggaggacgtgggggagaagtgttcactccaacgggcttcctgcggccgcccagccccctctcctggcactcttgcccccttgcccctgggcctcccctctgccctggaaaacgagagttggctgtcgccccacgtccaggtgggagcagtgagccggcgctgggaagggctttgggcctgtcctccggggtgagatgggactgacccctgggttcctggctgcccgccctgactccagaggtgtgaatgagccaggggtgcttattcagggcttgggaggcatctggaggcaagtgtggaaatgaagggtaggcgtgacatgcttttctttccctttcatgttacttttttggcttacacaagcaaaatgtgtttattctaggaatatataggaaaacacaaagaaggcattaaaccaagcagagagaggcctctctgacacctctttgagatggttcacagatcacagaactcagtccagggccagcccaggcgtctcctgtgattccggggcagcaaagggatgaagttccctcttcccaggggcccttcctgcccgctgcccccacctccaccccttgcgtggagggaagtcccaggggcttctggagtgagggtctgcccttgccccagggctccatgcctcctcccctccctgggaagcaaacctcaccccttccccgctccccacctgctgtataggcaggagacttgagaacaccaagtccaccatggccttctctgacgggggctgcccccacattggcctgactctttcagaatcacatctagttcccaagctgcacgactggggctctgggtctgttccatgctgacccagggcctaggccaggagggatggccggtcagcacggatgcgcgccctgcaccgtgctgggcccatcatgtgccttaagggagagaatcctcctacagcctgcatggtgggcgttcctgccccaacttctacaacaggggcagacaaagctcagagagctgcagccgcttccccaggcacccctgaccgcctttccaggctgggtcggctggttccaggcagacctgtgggcctgggagccaagcgcactcagggatgtgtcccagggtggattgggcctggtgtgggcaacgactctatgcccctctcatttgcttttcagagctgtgcccgcaacatagccccctggatgcgacgccccacaccctggtgcagcccatccccgccacgctggcttccgatcccgccagctgcccttgctgccagcatgaggacggccggcggccctcgggcctgggcagcaccgactcgggccaggagggctcgggctccgggagctccgctggtggcgaggacgaggcggatggggacggggcccggagcagcgaggacggagcctcctcagaactggggaaggaggaggaggaggaggagcaggcggatggggcggtctggctgtgcggggatgtgtggcgggagacgcgagccaagctgcgcggcatcgtggacagcaagtacttcaaccggggcatcatgatggccatcctggtcaacaccgtcagcatgggcatcgagcaccacgagcaggccagtgcagcgcagccgggccgggcctgcgggagaggtgtgagggccccaggaccctgcccaggcctgggcagccccatccatctgcctgggtttgtgtgtctgtccacctagaagtgccgggctgagctgggtccagttcatccatgtgaccttactgcccagccagggccgagctcagaggaaggaagggcttgggtgtctgccgaatgaatgatgagtgaacgagtgaagctggctaggactgggcctctccggggctcttttcctcctaagctgctcagcctggataccaaggcaaccacagcgcatcccctgccagtccctgcaaatctgacttctattcacctctccacctgagcccttctgttttcttctttaaaaaaaaaaaaaaaatttaaaaaacagatagagtcagagttttgctctgctgcccaggctggagtgcagtggcacgatcaagcgatcctccctcttcagcctcccaagtagctgggactacagggaggtgccaccaagcctggccacctgggcccttctgtccattcccccccaaacagctggggtgattcttccagagggccagtcttgttgggctcttccctgcctcaaaacttctgttgctcctcattgccctcaggacaaaatccagacctttgcatgaccctcaaggccccttgtctctgtcacaacgtcccttcaccaggccagggtgtcctgtcccatccagtgactccaccccatacagccccatggcgctgagggcgagtggccctgtggttgtcctgtgtgtcctctctgcatgtccctcctgtgggctgggagcagggaggacaggaggagtgggcgctgagctgaacagtgtgctccaggcccctgggccatcacagggctggtgggccccagggggacagtacataggggaggggacagcttctgggagatggtgggagctgggggaggatgtgtgtgtgaggagagcagggcctctgtggggacacgggagggaggggcagtggggttagcaaggatgcctcagtccacaggccccacctggggttgacagcctgggtggcaggtctggtcctgccccatttggaaaaacaccattttctggctcctgccatccaccagcccctggatggggtgactccctgaacccactccccagctctgcgaaggttcccacctagcagctggtgaccctgaggtccaacggcggggaagtcactggcccgaggtcccgccgccagctgggggccaggttcgaaccaacttctttctgtggcaagactgacgccccgggagggcttgggatttcgacattctgtttgctgccctgcggccctccttctgtggaggccctgcatgccgcaccccatggggccgcacacgcacctccctcttcgttagctcaccaagcacaggctccattcaatttacttaaatggggctcccggggctgccatgacactctgttcagagctgctcatttgccagccattccagcttaattaaaaaggtctctggggagggctagcgagagggctctctgcagggggagagctggtgagacagggcccccaggacccccttgcttagagttcagcctctggtcagtgcctgacccaggcctgcaggggagcagcattcctgcagaaagccccacagggaatgagtgctgtggggctcgctccagtctccaagtggggcagcatcgagggggcctgcacagccctgctaccctcgagccccggcactgtccttgccaggggcttgctggagccagctggtgagggccaatttccaaacactcaggaattttgcaagccagtgatgaaagagttgggagcttgaaattggccgtggagggagtatttacaccatggaaattggcagatgttccacatcagggctgtttgcagagggctctttgccagggtccagctggtccctgccttttcacccaccccatccatgtcaacaccacggccagggcaggtccagcctcaggccaggccacggtccctgcccaagcctcctcaggatctgcctctccctccttctgtcacatctgtctgatcaagctttccaacctcggatctggtggagccttttttttttttgagatggagtctcactctgttgtccaggctggagtgcattggtgtgatctgggctcactgcaacctccccctcccaggttcaagcaattctccaggcgtgtgccaccactcccagctaatttttagtagagacggggtttcgccatgttggccaggctggtcttgaactcctgacctcaggtgatctgcctgtctcaccctcccaaagtgctgggattacaggcatgagccaccgtgcccagccaggtggagcctcttctgggagcagcaggcttcacgtggcttcctgaccaggctaagagatgagagaggctgttcccactgtgcgtctcctgcctggtcacagggcccacctgatttcctcatctactaagcagatgtctttccctcacagggacaggccaccatttactgagcacctactgcaggccaggccctgtgccagcatggtgccagtgagtccagccaccctcaaggcaggtattattacctcgcccctcttgtacccttggaaggccactgctcagagagcaaatagatcacataacgtttgggtttcaatcctggttctggcctggcttggtggctcatgcctgtaatcccagcactttgggaggctgtggcgagaggatcacttgagcccagcagttcaagaccagcctgggcaacagagtgggaccccgtctctgcaaaaaataaacaaattaaccaagtgtggtggtgcatgtctgtagtcccagcttctcaggaggctgaggtgggaggtttgcttgaacccaggaatttgaggctgcagtgattggtgattgtgccactgtattccagcctggacaacagagcaagatcatgtgtcaaaacaaacaaaaaattccaaatcagccaaacaaaccaatcctggttctgctattgactggcagggtggccgggagtgcatcacttggcttcctcacctggcaccccccatctgtaaatgggtacacggatccccccacacggtggctaagagggctgactgcattgtgggtgcacggagccccccacacggtggctaagagggctgactgcattgtgggtgcacggagccccccacacagtggctaagagggctgactgcattgagaacctggcgcttagtaggtgctcactgatgagtcactgcttcagagtcttgtctgagctcacaccaccacccctgggtgcatttaccatcctctgtctggagcctcaaaaaattaaagtaagagggggaggatgagtctctgaaatgtcccttataaagcagctccaggggcagccatggtctcctgggctctgcgcagggcctgactatgggcccgctggtatttttgctccgctcgctcggctcccagacactgctctgcgggaaatgatccgcccccatgtttattttgagcagccctgtctgaggtggcgctcgcagagagaggtggcccagggcttccaaggggggtgcagggagagaaggagaggaggagagggtgggtgaactccctcagcccttctcctgcaggggaggcagcatggggggccttgccccataccccatcctggctggcagggagctctgtgacactgaggggcaggaggcgagggtgtgacatctgtgaagtggggcagagtgacctcaggcctggtcacagggtgcttgaatgacaggttagattgcagttgctcaagcctttagggtgaccactgctgctgaaatcttgggggcattacccagagaacagcttgctcatccaggttcctcatggcagcagatgctgtttcttgcagggcctggcctagaaggaggggatgggtgaggtagggtgtaggccaggcaggggcctgtgtgtgactcacgaagtggtgaaatggggctgaaattcccaccccctgggtagcccaggctgtgtgacgggcaggtgggacaggtcagctggggtggccaggcttctccagggaggcctgattccttcatcatcaccgccatcactgcatcacagctcttcctggtgtgatcctctggcagtcttgtggggcaggctgggggagcatctaatcaccaccaggcagatggggaaactgaggctcagtgaagtagatggcttgcccaaggtgccagggtgagcagcgacagagccgggctcccggagattgaggtcagctgtggacagttgaactggaggaaggcattgctcctaggagcagtgtctgttcagcttctctctcctgcacacacccatgcaggccctgactccccctgagctgggcagggctgccctgcagctttatcatgtcctggagctggaggctaaccaccaagttggagaacaaaaaacagagggttggggcgcatgggcagcagggcagggtgcggggagcctcctgggtagggctgaccccaggccagggcatagttactggccccagctcccagaggactgcattcaaggcctctgaatcagtggctggatcaaagctggctttattcttccttcagcagccccttacgtgtcaagtcactgccaatccaggtctggggtgactctgggaagtgaagaatggggtggcttagtggctgacattccagctctataggggcccaagggagagaaacaccaacatggacagcagtcatggaaggcttcctggaggtgatggcactggggacggatcccgaaggatgactaggagttcatcagcgagacagagggacagggaccaggagcataggtatcccccaaaaggaccctgagtcctcaagaaggatgtgtacaaggggcagggcagacagtgcaggaggccaggagggctgttcattcaggaggaccttggagctggttttatccttagggcaatggggagcccggaaaggcttgcaagcaaatgacacatttgtgctgaactggggcctcatcagaaaaggggggcaggtgaaggcacctgggccatggaggtggggatgtggccagagggagaagacctagggttgagatctgacttcaacacagcctggccatgaccctgggcagtcagttccctttgagtctcaggctccctgtctgtaaaatggtgataatacagggcttgagattgagaggagataatgcatggggcgtgctcagcacacccggcccatgggaggggcctaatcaacgctagctgccattattatgatggggatggtgctgggctggagggcttcccggggggcagctgacctctgcacacccttatctacccctacagaaatggcagaggctgggcagcctggtgtcacccaaacccgcatcaggcagggacttgcaggctcccactgctgccccctacctcctgcctctggctgaacttggtgttttcagcccttcagcatgtctgccttcactgggtggtctttgccacctccagcgagctttctgccatctgtctgtctgtcctgctgtctgtctgcctgctctttttgtgtctctttctggccgtacctatggttcccatggtgtcactgcttcgttgtcctggtccttcttcacatccgtgtccctgctttcctgtctccatgtctccatctctccatgccccacctttgcccctcactcccttgtctctatctgtctgtctgtctgtctctgcccatctccgcccctccctctccatgtcccctcctccttgggctcccacttgctgtgtctatattcgtctgtgtgtctctgtcccggagaaatgctttcatgagtgatggatggtccattagaaaaagattaacaggtgtgctgaatggaggaacatctgttgtgagggaggaggaggcgcggggtgaccttttggatggcagtggctccctgcatccctggtaggagtgtgtgcgtggcgcgcgcggctggagccagctgatcatcatcacggagtgtcagcgcctacagctttcatctccgcggacatcgcttactgggctggcaaattgctggctctgagcagcatctggaccctggctcagtcctccccaccgagggtccctctcagggtcctactcctcttttgggacgacttcttgagtcagatgtaattacagatggaaatgggccttctcctttcatctgggcttgagaggagctggcagttttattagctttcccaggcatcaggctggaagctggcgcttgggttgttattttttttttccatcctccttttaacccacatggagtcggagtcaggtccttgcggctccccgttgctgatggaggggctcctgctctcggtcctctgctctcccacctcccagccagctgggtcctccacctgcacacccttctctgctccctggcgccagctctctcttagcttttaggtctctgctgagatgtcgctgcctcctgaccccactagcaccgctcccctagccaccccccactttcctggcgtcagcacacactggcttggtttgttaacttggtttactgggctttggccccagagcacgagcttctcaaaggcagggacggtgccctgactccctcaccactgcccaccctggtagctcgagcccagcacatcatgtcattcaaatttgtggtagccatgcaggaatgaatgaatgaatgaatgaatgaatgaatttggctgcagtccccatgtggtgtaacgggagagcagtttggagtccagcttggttcagtgccctgcctttgccctgccacatccttgctaggtggctctgaacaagtcattccccctcccagtttccctagcctcagtctcctcatctgtaaaacggagaggctaacttgtgttgggcgtcaaatcaggtctcaacgacagtgcttcctttctctgtgattcaggcagggatgacctggcaccacagtgagcacacaccagacacttcatcagtcccaggggagccgtggcagggagagaaggggctgggcctcgtaggagccttagaggagaggcttggatgaattggttcctcactcgaccccgtggttttatggataaggaaactaaactccagaggaggggggaagcaactttcccaggaccacacagccacttaatgtccaaaccaaacccggacccctccaacttcccccactgcccccagtcgtggcctctagtgtggcctgctttgaacactggggttctttgaacaatgccatttgcaggatatcagttaaaaaccaggggtaaacagctctgggagcagagggaggctccacagctgttgggggagggagctagtctccctctgaccaactagtggctttgggcaggtcctctaacctccctgggtctgaatgtcctcctccgagagctgctgggagtgctaagagccaccacgggtgctctgtgtgcaggactgtgcctggcatgcagcaggtacattgtgtccaccgtcctttcatggggcacgatgtccccagccacccttggtcctgagacggccattgctgggaaggggagagaaaagttctgcatgggcgggggttaagggcaggagtcttggagccaggctgcctgggttcaaatcctggccacaccacttgttagctctgtggcctcaggcaagggactggcgtcctgtgaacccgtgtccttgcctgtctgcagacgggttcttgtgaggggctaagtgaagtgatggctgtaaaatgcatagaacggttcccggcacgtggtaagtgctcactaaatgggttagtgacgtctagcgacgcctgtcctgctttcctgtcttgctctgcatcttagccgtgtgacctcaggctggcctccaagcctctttttcctcatccgtaaaatgcgtatcagaacacttccctggtagtgtgctacaagcctcatttccaaatttgtggaaggtcagcgctgtggggtcccccaaccctcaccatctcagcagacctctcacgaccccaaggtagcagagttgagaggggccctcggggccttgtgcatggggcagtggggagacggaggtatggtgaggacaccgacctgccagggtcacacagccagggtgggtgtccagaggggatccacagctgccctctggcctgaccgggtctccattccccaccccaatgccccacagccggaggagctgaccaacatcctggagatctgcaatgtggtcttcaccagcatgtttgccctggagatgatcctgaagctggctgcatttgggctcttcgactacctgcgtaacccctacaacatcttcgacagcatcattgtcatcatcaggtacccctcccccaacccacccggcagcagagtgcctcggggggacatttactgcaaagaccccagccagcatataaaggacataagatggctgtggaaacccgttgcactgaaacaattatcgaaatagtcaaacatttgtgatttagcaacatatttctgtcaagttaaacagcatgatctagcagcgcgtctgtgactgctatcattccgaggaagggatgggcataaatcatattgggaaacaactgcatcggctgtcacgtgacgtgaagacaccagttactttgattgccacaaagccataggtactgctaattctctgtggcttcctgtttacattcataaccaaaagacacgttaaatctcaaaaagaggacagtgatatccatggacctccggattctagccagagacttcttgtgggggtggtggtggtccatggactccaagtgaagagcccctgattagcttgtggcgtggagcagcatccaacatatttgtcagatggatggatgaatggaagctctgtctctctgttttcccttctccctctgtcttcctctccccctggcctcctactgctgcctcctacctgtaccctgggcctgccctgcgggaccgcagcatctgggagattgtggggcaggcggacggtgggctgtcggtgctgcggaccttccggctgctgcgcgtgctgaaactggtgcgcttcatgcctgccctgcggcgccagctcgtggtgctcatgaagaccatggacaacgtggccaccttctgcatgctgctcatgctcttcatcttcatcttcaggtgagcctgccctgctgggggccatacctcagcacctgctggggctgtgggcgggagcctgggggatgtggtccactgtgcttctctggacaaagccacctggacctgggtgtgaagcctgacactgttcctcagtcccctgtggctttcagcaagcatgaacccctaagcctcagtgttcatctctgtaaaatgggaccaacgctgccccgcctccccctgccctgcattttactgagttgactgagaatgaaacaaggtgagtaggcagtttggtgcatgtgagtccgatgagcctcttccatcctttccccagcatccttgggatgcatatttttggctgcaagttcagcctccgcacggacactggagacacggtgcccgacaggaagaacttcgactccctgctgtgggccatcgtcactgtgttccaggtgagtggccgctgcgtgttcatgtttgctggggaagcgatgggacagtaggcctgggaggggcggggctgacaactcccatgcctccttgtagagcctagccctggactaggggtaccccagggctaactgtgtctccccaacagatcctcacccaggaggactggaacgtcgttctctacaatggcatggcctccacttctccctgggcctccctctactttgtcgccctcatgaccttcggcaactatgtgctcttcaacctgctggtggccatcctggtggagggcttccaggcggaggtgactgtggtcttggcagaggaagcacccccacagggtctgcgaaagactgggcgagggagaggtggcctggatgggggagggctgcaattcaaacttctagcaggcaacctatccctaaaggagggggttgctgatgaggtggtgagctcttcatcataggaagcatgcaaatggagactgcgtctgccatccctgctcccccccagggatgtaggactaggcttctccatctctgagattcgaaatcccccaagattagggactctgggccctgctccctccgttctctgaggctctggggatacttgcagtcaggcagatgtagggttgtgacctaggttcttgttagcatctcatttcccttttccaaacctcagttttcccatttgcaaaatggcggtggaaacacccatagaaaaattctagagggagctgggaagggaggagctggactgacctgcattctaacgtgacggatgctctcccagggtgacgccaatcgctcctactcggacgaggaccagagctcatccaacatagaagagtttgataagctccaggaaggcctggacagcagcggaggtaaacaggccctcgcttgtcacctagagagcccagagccttctccacagatccaggtgggcagagggtacagcgtctgactccacctcaagcccaggctcagggactgctacttatctatggtttgttgtttacgttcataattggaaaaaatgtgaaatctcaaaaagaggtcagtgacatccatggacccctgggattctaggcacaggggtagccgcagcccaccacatccctccacataccagggccccttggttagagccttggggccttaggtcaaggtgtaggttctggtcctgcctggcactactgggcatcttggaacaagcatcctccaaccctagcccagtgtctttctcggtaactggggcggacagtccctgccttgtttcccatagtgggcatgggagtgaggtgtcaggctggttctgagcacagaaggcaaggggtccacacatacctaaataaagctaagagccctgcaggtggggcgaaggggaggcactgtgatggggtgcaaccaggaagacttcctggtagaggaagcctccttagaaaagctctccatttctgctccttccttgtttgtctgtctcgtggctcccttgctgttgttctgtcctgtctgccatctgtccctccctctgtctccatctcactcctccagatcccaagctctgcccaatccccatgacccccaatgggcacctggaccccagtctcccactgggtgggcacctaggtcctgctggggctgcgggacctgccccccgactctcactgcagccggaccccatgctggtggccctgggctcccgaaagagcagtgtcatgtctctagggaggatgagctatgaccagcgctccctggtgagtccttgtggggagctctggacgggcgcttcctgctggggtgtgtgtggaggggccctgaagagaggtacctgccagtctagcctcagactctggtgcccagccaaagtcaggcaggggccatgtctgttgcattcctgggtgcccagtgccagagtgggacctggcaataaggaacgaatgaaggcctagtgccagtggggtctggtgcagagaattggattttcatctcagcaacaatgtgtagggtaaaaagagctgggctttggagtcaggcagactgcagcttgaatccaccttctgccacttccaagctgtgtgaccaggagcaaattactgcccttctctgagcctcagtttccttacctgcaaaatgggaagatggccctaacttgctgtaccttcctcaagggaagtgaggtggcaggaggggatgtaacctccgggtggatgtgcccccatgtccctgtggatgtggatggagtgaggtgggacagggagaggagctctagggtcaagcccattccatcacccgctggccaggtgggtggtcttagagccacagcgggggtgcaggctgcctttgggcacctggtgccccagccgtgggtgtgcctgtggggcgctgacccgaacgggaactccttccagtccagctcccggagctcctactacgggccatggggccgcagcgcggcctgggccagccgtcgctccagctggaacagcctcaagcacaagccgccgtcggcggagcatgagtccctgctctctgcggagcgcggcggcggcgcccgggtctgcgaggttgccgcggacgaggggccgccgcgggccgcacccctgcacaccccacacgcccaccacattcatcacgggccccatctggcgcaccgccaccgccaccaccgccggacgctgtccctcgacaacagggactcggtggacctggccgagctggtgcccgcggtgggcgcccacccccgggccgcctggagggcggcaggcccggcccccgggcatgaggactgcaatggcaggatgcccagcatcgccaaagacgtcttcaccaagatgggcgaccgcggggatcgcggggaggatgaggaggaaatcgactacgtgagtgggggcggggccgaaggggacctggtgcggtgggataggacagaagtgggtgcggccccaggaggcggggcccgagcgggcgggcccacggggggcgtggccggggcgtggccggagcggctagggcttcaggtgtgaggcaggaggggtggggccagaactgcccacacctgagctgggccggctcctgggagagaagccctccctggctgcccccggggggcagagagttcggaggtgaccctgcgaccccagttggcgcgatggccgcatgggcggagaccggcaaccctgcgcatcgctgacccccggcgctccgtcctcctcttgctagaccctgtgcttccgcgtccgcaagatgatcgacgtctataagcccgactggtgcgaggtccgcgaagactggtctgtctacctcttctctcccgagaacaggtgggcagggccaggcctggggtgagggttagagtaggggtaacgtgggagggacggatctctgccaagccaggcaaggccattggtggcgctctcccagaccacagcggaccctcccggcccagaggtgggggtctccaggggagagtgcagcctcctgagggctgctgggtgaagatggatttggggagtgggattggctggaggaggtcagggaagagtctcagccttggcttccaagatccctggggatcagggttccctctggggctaggcgaggactttaggcaagacggatgttggtggccaggctctcctgggctctcctctagtctaggccatccctgtgctgggcaccaggttgaaccattctcaagtagcctgtatggcttgcatctgaggggacatcagaaggcttcctggaggaggaggcctttgtgctgggctctggaggcaggtggcattccagtaggcacatcaggggctgtgaagaggaggagcctggtgcaggggcagggagcagcctgagggaaggcctggggcagaagcagagggtactaggcagcgtggtatcctcctgacaggctcagggatctgggctgggtaagcctcgagtgccagggaaaggtgggtgacctcgtggtgtgggtgtatggtcagaggaggcagcgccaggtgggcaccctgagcaggtgtagagtcggcacctggccagaggagaggataggggttgcttcctcgaggccagcgtggtctgcactgctgcctgggccctctgccttccttctggccagggtgggaggcagctgacgctcaggcagcccccgcccaccctgcccaggttccgggtcctgtgtcagaccattattgcccacaaactcttcgactacgtcgtcctggccttcatctttctcaactgcatcaccatcgccctggagcggcctcagatcgaggccggcagcaccgtgagtggctgtagcctttgggcagggcaggcgccaggccaagggacagctcgccagggctgagcagggcagggagacctcaccgaggtggggaggcaggacaggaagtttgcctttggggcggggaaagcctccgtgaactgagaggtggcagcctctcctctacgaaccttggccaaagcagcggctggccagtggccgggcagctctgggagcccctgagcctatggtatctcccgatgctttcaggaacgcatctttctcaccgtgtccaactacatcttcacggccatcttcgtgggcgagatgacattgaaggtagctcccggtttcacccgggacccctgctagccccagctcgggcccctggccctgggtcagcccctgcctcagcttgtcactcgcctgccatcggcttcatttcactcgtagccccatggcccacccctctgggtgccagccccggggctgggctcccgcgacccagagggggtcagccccgtccccattcacaggagtcacaaacccaccagacagatgggtgcagggaacactgagtgtgatggaggcacctgctagaggtgtggggcgcaggggaagcatcccgtctggggcgcttcccagggcgggcagttttcaattggatttgccagaggcaccgggaacctaacagggcggcctgctgggccctgaccctgccctgtcccctcccatcaaccgccctcagagggcggcctgaaccctccccttcccttcggccccgccacttgcaggaccccgccccctccccgaagccgatcaggcctcgccccgcccccttgcatagagcccggttggccccgcccacctgcccgcccctcccgcggcagcctgaccccggccccacccccgccccaggtagtctcgctgggcctgtacttcggcgagcaggcgtacctacgcagcagctggaacgtgctggatggctttcttgtcttcgtgtccatcatcgacatcgtggtgtccctggcctcagccgggggagccaagatcttgggggtcctccgagtcttgcggctcctgcgcaccctacgccccctgcggtgaggacccctcctgggcggatgggggaaagtgtcatgcactgtaccgagaagccacgggtcgaattgggccctcactccgccctccccgcccgcccactcggtcctccaatagtgagtgccaaacaccctgagctgttcccgggggaggggtctgcagaccctgggggtggggtatgctggaagagcagggctgaagctggaccccagtattgctgcccactctgcgtgtccctgagtggctcgttgccatctctgggtatcagtccctagaccagggtgtggtgtggaccccgaggagctgggcacagtgaggggtgagggcacgtaccctgctgctgctgtagatctgaggcctgggtgcagcttgcctcctgctctgcccgtgtctgggctgcctggccactttctctgcattcctggagactgtcctcatgccccagggtgttcagccctggtgagccctggggactcatgccctgggatactcagccctggtgactctgggctgagtaggggctgcctcctggcctggccaagggattatgtgtgcctggcctctccctgccgtcagtgtcatcagccgggcgccgggcctgaagctggtggtggagacactcatctcctccctcaagcccatcggcaacatcgtgctcatctgctgtgccttcttcatcatctttggcatcctgggagtgcaggtgaggggtgcccagtctgggcagggactgggctctgtgactggggaaaaggaagtctcagacagccaggggagagactccacattccaacctcatgcgccttgccagctgtgggcttctcctccagggagggagacagacatgggcccagatgactgagcacaagacagtctgagtaaacgcgatcgagaggcgagttcctctctgacttgcaaccctcacctgtgagagcaccaacctcaccccctttccccagctcttcaagggcaagttctaccactgtctgggcgtggacacccgcaacatcaccaaccgctcggactgcatggccgccaactaccgctgggtccatcacaaatacaacttcgacaacctgggccaggtgagcaccaccgtcctagccctgatcagaccctcccctctcttggatgccagtggctctgggaatcacagacctggcttgtcttgcactgccaggactgacactgacttctcctctccaagcctcagtttcctcttctgcaaaatgggtaagggtagcactcacctctcaggtgggatgaggcttagagagtctgtgtgcagagtgcccagcaaatgcctgcacttagtaggtgctttgtgaacattggttcttggctcccacccccgacccagggacccctgacaggagttttagaatcaagcagtcctggaggtgaatccagctctgccaccttctgtaggtgtggcctccctgagcctcagtttcctcatctatgaaatgggaatgttatagcctgccaggcaggctgcggtcgagatgaaaggatatcaagcccttggcccggggtggtactctctcccctcacccaccgctgctctctgctctgtcggcaggcagacccctgcctggtgtctgctttccccttggtctcctctcctgagggcctgccaggtgtgacccatctgggcagtgccccaggtgagggcccttggctggctgcctccccttccctgctctcatttctcgagggcctgcccaggaggccaggtatgtccagacgtaggcgtgccttgccccagggcacacagggaggagcaggctccaggccctcgtcccccactggctgatgggcagcctccagctagatcccactggagggcttgccccacaatggcacctgggaggggagccacagggccttggaggggtagtgagtgcccagggaaagggtgtcaggaaccaggacagtcactacccctgccctcctggggaaaagatgtcttaggaagttgagggggaaccagccagcggccttttgtgcccgtgctcctgacccccttcacctatgggccccgccccagtgccagctccgcccctttggagcatttctgggtctgcctggctctcctggaaccctgcgtggggtgttctctgtactcggagccacctggagggttccaacctggcctgcagcctctgactcctcagtggcccttaccagccgtgtgccctcagacacgtgccagaccctctgttccagtgtcctcatttgtcaacagggacagtgatggcaggtccttggaatgtaggagcctcctgtgcccttggcagggggtcttcctctgctttccctgctcctgggtctgaacactttctggatacctttggcaccattcccacctgggaagggaagaggaaggggtctgtgctctggatggtgggaaggaggggccagtgcagggccagagactcattccagaaccccatgccctggcccacagtggcaggagcgcagaggggggtgagaccacctctgccctggggagagggcttcctgagtaggacatgtaacctccgggcagtttcagatgaaatgggaccctttgtgaacctactaactactggtgcaaagatggcacaggaggctgtgctcaagttcagttcagaaaacctttactgagcacctgctgtgtgcaaggttctgtgctgggtgctgcagaaccagatgtgaactcacttaagggacatgaggatgctgatctgccatctctgtgggagccttgggtggctgtgttctgggaaccacctccttttcaaaaccagggagaggagttattaccattttacagatgaggaaatgggcccatagacatcaaggaacttgccccaaatcacatagccagtgagtggcacagcctgggctctgacccagggctcctgactcctctcacgagctcctgttttcagatgctggggcaagcgtgtcttacccactggagtaaggatggcagggaccgtctggttgagcctcagctggccctcccagcacacctgccagaaaagtatttgttagctccattctgtgggtgaggggacaggagttcatgaatttttttttgcccaagatcacacagctggataatttcagagctgagaccaaaacccaggaccgtgggtccagcactttttcttctataacagtaactacaagagtatgtggcaggcacatagtaggtccttaggaaagtttgttggacgagggcacagctctgccacacagagaagacctctttgtccctctgcctcccaagggcagaagaatagagagctgaggaggggtggctgcagctggagtcactcacagtcctcacccctgcattccgcctccccatgtctcccaggctctgatgtccctctttgtcctggcatccaaggatggttgggtgaacatcatgtacaatggactggatgctgttgctgtggaccagcaggtgggtgtagctgggaccaggccaagccttgatgcagggaggaacatggtgtccttggggcccagtggtttgaatttgaaactggtgccaatgagttccacagccccagtgtctccccactgtcagcacagcccactcctcacatcctggcctgaatcttcaccattacagtccctcctcgggtagcgtaagtcgtcgttccatttgctttggcaaacccccccactttgtgtgaagaggcatctgagctgcaccctgcctggaagggtgcagagcctggtgggtagagaaccaagtgcaggcagagaagaggggctgagccagctggtagaggaacagagtgtgagagagtgatgtgtttagggaattgggagttgggagccaggagtagaaagtgagagaggcatgaggtggggagaggaggcaggtagtgttaggtggtctgcaagcccccgggtgtgccatgacaaggggcaaaagtttattctgagggcagagagagccggtgagggacttacagcaagagtggtgtccctgcttgtcaggtctgcttgtcagtgcagcttcctgagggctgctgggtgaagatggatttggggagggggattgggtggaggaagtcagggaggagactcagccttggcttctgagacccctgagtagcaggggtccctctggggctaggcggggactttaggcaagacgtgtggctgaccaaggttggctgtgtccagactgagggggtcactgggagaagaaacagaaagattctctagctcaagacagggcccactcagtggtggaagcagggctgtgtgcaactcccaggctggtaatggacctctggctcttggcttcatgggtcccacccagtaaggctctggagctggacgtgggggtggcagtattgtgtgggaggaatgcgaacacttggacgcatctttctctatttccttgtctgctctgtctcctcacccccaccagtgcatgcatgcacatgcgtacatggattccaccaaggaatctgtgcatccaagttctcccctctgctggccgccttgttttctgccttatttctggatgggcgaataagtggctggtgggtggatggatgggtggatgcatggatgggtgaatggatggatgggtggatggatgaatggatgggtgggtggatggatgggtgggtagataaatgaatgggtggctggctggctggctggtgggtagatggatgggtggatgcatagatgggtgaatggatagatgggtggatgagtggatggatgggtgggtggatggatggatggatgggtggtggatggatgggtgggtgagtgggaggataggtggatggatggatggatgcatgcataggtgaatgaatggataggtcaatgagaggaagaagacagatgtttccaggaggcagccactgagcagggaaggagaggtggctttcttggctgaggacgatattgtgccatgcccagggtatttacttcttacctgctgcctcatttagacctcacagccaccttcctggaggcaggctcaacacatgcccactccatggaggctcagccaggatgggcacctccccatggccctgtagggcccaatcagcctcctcagccctttctgactcccctgcagcctgtgaccaaccacaacccctggatgctgctgtacttcatctccttcctgctcatcgtcagcttctttgtgctcaacatgtttgtgggtgtcgtggtggagaacttccacaagtgccggcagcaccaggaggctgaagaggcacggcggcgtgaggagaagcggctgcggcgcctggagaagaagcgccggagtgagtgggtgcctgtggagggcgtgggccacccagctctaagcccttctgcctgggcctgaccccagcctcctgagcctttggagctggaagggaacaaaagatacagcccctgtgcccagggctcagccacttctcccagcatcttcctgtccaggggatctgagccccatcagtgtccatccagagtccaatggctgacaccactgccaacctgagtgaggctgttgggggttcagcccaggcatagggcaaaggcagaccctgggtgccctgggccatgggaaacctgccctcccagcaggcaggcccagagctcctgccacaagctcatttggggtagatggagagaatgaatgtcctgccttctttgtcacccttctccacagtttctctcatggtgctttggctgggtggaggagatctaacactgatcccagggcctggggtggatcaacatcttcctctttgccccctccctttcctccacctttctgtcctttgtgctctgtgccctttcccttgaccccaaccctctgtggtctttgccactccccctgcaccacctgcagaggcccagcggctgccctactatgccacctattgtcacacccggctgctcatccactccatgtgcaccagccactacctggacatcttcatcaccttcatcatctgcctcaacgtggtcaccatgtccctggagcactacaatcagcccacggtgagccctggtctgcctcccagcccaaggttacaaggtgagggtggggtctcagcaggaccccaccccagggatagggtggggaaggggttagctgatagcaggatgtgagcagcccctccatgctgggctctatgctgggcactgcagtgggaggaggtgccggacaagcttgccctcaggaagctcagagtctggaagggaacggtcagagggaaggtgggtcagggaggcaggatttggaccgtggcttgcacatgggtggcaatgactgtgatgtgttaaatattgactctttgcaaggcacgctacatatatgaactctttaatcctcgcagcaatcctaaggctggcagggggaatcctttgtctggattttataggtgaagagcctgaggcttagagaggttaaatatgctgcccaaattactcagccataggtagtggaaccaggtctggaacttagatttgcattcaaagcctaccatgtagcctcctttactacctgggtatatggagacgaggcaaaagggtggaaggaccatttcaggcaaacactgggggtgggtgaggatgaccatttcccagcttgttgcagaccaggtatgtgaggggcatgtgaggagcaagtgcattctaaaaaccctgatggagttggaggggaagaagagggaagcagagccgccaggtgtgaaattaataccttatttcaaatgatgggagaggaatattatgaatgcagaaaaaagaaagataaccattggcagaatgaaacaataattatacaacttccaaattaacaggaaaaatggaatattaatagcttacatttaccaagtattattctgtttccagcaccgaactatcagctcatttaatttgcataccagctttctaagatgaaatgacttactcaagatcataaggtgaatatggagtgagcactaagccaggattcaaatgtaggcagtctggctcagtagctcttcattaataccctatattgcctccaaaggtaccaactcgaccagatacacataaataagaaaaagggaacagaaggaatagcagcataaaataaatagtacacactaagatggaaagaataaaagcagcatataaataattacactaaaagtaaatggactaaattctctccttaaaaggcagagactttctgagtggaggaaggttgtggagcaggtcatgtgccctggatcatgcttctctttgttcctccatagtccctggagacagccctcaagtactgcaactatatgttcaccactgtctttgtgctggaggctgtgctgaagctggtggcatttggtctgaggcgcttcttcaaggaccggtgagtggccaggctggattagggcagtaatagggtagactgcaggatgaagaagcagtcctgacccttagggaagtctggagcagcctgaagaggggaaccagtaagcatctaggcacggatggacaggcaccccagctgctgcttatagctctgaacaggaaataattatggtatcatctgatgggcgtagggcattctacctggcccttcttggctcatctttggtacgttgtctctaccctatgggcagagcagggtctgcctcatgctaatactcctttttgaagggaatagtgaggctcaaagaagttgatggactagcctaaggccagacagagagagcagccagctcaagattagacttggaagtcatagtccatgcctcctctcctgcaggaggccagagatatttatttagcctgatcagccccttgcttgacggagtgatggctatggggagcagagaggggcctggacccagtggcgttaggaggggctagtaagggagggcagccacacagcctaatgggccacaatagaagggtcaggacctgggaggctccccccactaaggtgtgtctgaaccagagggatcctcctcatgcccactcctgccctcccatgcacggctgagcagatggaaccagctggacctggccattgtgctactgtcagtcatgggcatcaccctggaggagatcgagatcaatgcggccctgcccatcaatcccaccatcatccgcatcatgagggttctgcgcattgcccgaggtgaggggcaaggggtgggacagggaacggggacaagcaggggcgggatgagactcctcattgcctgatgagaacacacaggagtggggtggggaggggtgggggcaggagtttgcaggcatggtgggctccttgctgaacaggggtgagaaggagctgggaggcacacagccaacacacacgcatgcaccctctgtgtgcacacacctcccccaacacacaggcaactttgcatagcacacatggacacacactcccacttccttatgacgccatgacccatggggtccagtctcagagtgtgatgcaaggaacccagtccaactgggaagatgtgaaacacctccagttcctcgctggcatttctcaaacacagtgactgggacgcacggtcttcagagatccttctccctcccctcaaggtagttcgtacacttcttttaaaagcctcctgcctcagggcgagcccaggtgcctcttgctcttctgcctgccagaaactcagcgagtgatgccagagtcctctttatcgagaggggaagagaagagatgtggccactcacgctggtcctttgtgcccgtgacagttcatggcccacccattcacacacttcatagacctcagtttccatgagtatgccccgtcctcgggggcttttctacagtgacacccacgccttgtgtccacatgtttttgtgcatgccccactcaccctgtggctgcacccacattcttgtaatgtggtatctgagagccagactctgcttgcacgtgccttcatgttctcttctcccaagtttacacacgtgcacacatgcgtgcacacacacgtccccaccggcctggggctgagtgggcagggctgggtctcgcccgcagtgctgaagctgttgaagatggccacaggaatgcgggccctgctggacacggtggtgcaagctttgccccaggtaagagccactctttctggcagccctcctaggggtcattggtgtcaggctgggccctggggcatgaaggccctgatttcccttctcctcacatctgccagagccagggcagatgctgtctctggggatgcattttgagccaggggctgagaggcaggaagggtccctttatgcctctttcttccagtttcaccatgtggttgccagtgccactctgtgtccagccctgtgcacgcactgagggtccacattgtgcccttggttgcccccaggctggtggagggagatggatacttcagggagatgtggggagggacctccagcatgctccagagagagagaagagtgccagacactccctggggagatcagggaaggcagcctaggaaaggggacctttgagcttgacttccaagggtggcttggcagaaggaggtggcagtgtggatggagaagttccgagatggcattccaggaggggcagcatgagaccctgacccaggtggggatctgagaagttagggaagttgctctacccgcaccctgcggttagtgaaaggggagatgtgatcagggccacagagggcatctttttcatcctcccgagaattctgcaatcccagtccttccctcccccgctgtcttgactgcttgaggctccccttccccctcccctcagggtggcctctgctctcagctgagcctcaggcacatttattcattatgactcaacgagtcatcaggaagtttaggtgccttaaaatacaaggcacagatactgcacattaaaaatgaggatacaagattaatggcccagggaaggtggaagcagagctaattctttcggggaccggggctaaggacatgggtgagttctgttcctgaatttggtgtgagcttcccagcagccttggtataaagggaaagtggcatggtctggatggaaagcaagggcattcattcagagacgtggtttttcctaacactaaaccccttcaggggactttgtcccatgggagatgggggtgatgctgggctgcaggctgtgccgacaggaagtagattggagccccggcttgggccataatgcttgagagcaaagcctgggccctgggcatgcgacttagcttttcgtgcctcagtttccttgcctgtgaaatgaggatggtggtgaagcatcgctccctcaagcgcttatttcaaagggcggcggtgaggtgtcagatggttaaagcttatgaagcacttaagaggtctggttcatgagaagtgccatttaagaggctgctaggggtggggatggtgagtgtgtggctcggcctccctggcctccttgctccctctccccttccccatgctctgacccctgggcggttctatcatgactcccaaatccagtgtggagctggcatggggcacggcacatggagatgttcaggacatcccagcctccagcaggagacccaaggtagtcattacaagtgcattagcacttgagaagaagcacgtgccaagtgccactggccgtgaaatggtgcttacccctcaaaatccatttgctgttgctcatgttgttgtatggacattggccatttcctcgattctacgtaaagtgctaggaaaatgaaacttcagcctcttcccaccagtctctgccccaagaagagggaggaggcatcagagaaggcttctcaggggaggtgacccatggactgggctttgaggggtggggaggaggcattttacaggcaaagatagagggtcctccctgcagagggaaaataatatgccaaggcactgtggggctgttttctgtgtggctggagtgtgtgggattggaagatcaggctgggaggggggtccctgggggccaggtcacagcacaccttcagtgctagggcagcagaattgggctttatcttgcaggcagcaggtgccacaggagggttctagacaaggaaggctgcagccgagctgcctttgagaaggtggctctgctggctgggaggagaatggattggagggagaggctggaggcagggaagctggtgaggaggctgctgcaaccctgccggctctgagatgctgacagcagggaggggacagatagaaaagctgacggcaatcctggttaagagatgctgcccccgccggcctgtgcagggcacaaagctgaattcctagagccgcgaccacgccagatccttctcagcggtcagggccttacagttggcctcacgggtgctcagtaagtgcttgttttattaatgaagggaacatcatttaattagtcagacactagcagtgtagaacggctggccaggaaaccctgctctggagtggagcggagaaactcgaggagtggtgattaatggggtttacttttcagcagttaacgtgaacgttttctgagggttctaaggccttctgagggttctaagagatatttcatttctagggcaagaatgtgttttagccttatcttatccatagcatgagttaaaggtggtctccaatgcatggatagatttgaactaggtttggaatctgggacgctttctcccacaggagctgtgggatgggggtggctgggtttgcagaggcttctggggcccacgggcctgcgtgattcctgccttccctcctctctatggccaggcctcatgctggcccaaggaggcaaatctgacctcatgcagctgtgttcctgctcttgaagatttcccagaccagcagatgacagtgacagggataagtgcatttcggtggtttcgtagaggagctagtgttagagctgagacctcctgccttctcccttcccttcgttcatccatccattcaaccttggtagccactcaaggcgtgtagcatagattgtgtgcatggaccctggggccagcctgctgggtttggacccttgtcctaccagttactagctgtgcgactctggacaagtgatgtcacctctcagtctgtctccttcttcttctgaagaatggggataaaagatagttcgtggattattgtgaggaggaagtgagctcatgaaccttaagtgctggaaatgggacagcttgtggtaaaggtggcacaagtgttttcttgttattctgagccctgtgctggacccagcctgccctccaggtcctgtaggggtggcagacgtggacacacagcctgggggaatgttacagctgctctgacccacaggctgcccaaccccactgccccagcctccacccttcccaggcctggtgcgcccccacccgctccccagccccacccggcctcacctgtcctcccgcaggtgggcaacctgggcctcctcttcatgctgctcttcttcatctatgctgctctcggggtggagctctttgggaagctgggtgagtgactcccagagcaggcccgtggtgggggtgcagcagggctgcaggaggaactgggggggcgggggaggcctgagacccctgagcccgtcacatcagggtctttgtattggggagatgcctacagcagggccctcagctgtctggtctcccaggaaaactgccctccctaccccggtgttggtgcctgtcctgagccagcgccaccccagcaagtggagaggccagggcaggggaaagagcaacagagcgctcgctgagctccgccctgcaccgggatggctccagaaagcagggttccccgaggggctggccctcaccccatttcaccctctttctcagaaacccattcttcggcggggagcagagccagactcacccaaacctgagccccagctcatgtgccatctccccgagcctcagtttatctgtgggctgggcacagtctgcaggcccctcctagggtgtgatgagggttctgaggcgaggcgggaggcaccaggtcagggtgagccccgcaggcactccgccatcgggcagggctgacctcctccccgcttccagtctgcaacgacgagaacccgtgcgagggcatgagccggcatgccaccttcgagaacttcggcatggccttcctcacactcttccaggtctccacgggtgacaactggaacgggatcatgaaggtactcctgggcgggctggggtggagaaatcagccaggtgctgggacagtgaggatgctggtcctgctgctcagggctctgcccacccagggccccaccacacatgggaggggcatgcagggcacggaggagtggaggggcctgcccaggaccagcacagtggggagagctgagccagaacaggccccctgtctacactgcctcatcccccagtgttgcctgggatcagggctcagattctagggtagacaactccacccagttccggaggggacctggggcccaggcaggcctgaaggccagggccaggccccctagtgatttccacgctgaccaggtcacccggcagaggctccctggcctgggctgcaacccgggctgggctgggaagggcagggaggggctcccagaggacaggggtaaggcctcggttccggggccctagggtggagagggcagaggtaggcctgttctgcctcccacccccaccctgcagagcccccagtgcccccagcaagggggcaggaagccagggtgctgggagaggcggccaatctcctcagcccagggcgggaaggtgatggagtcttcttgggctttgtggttgggggttgagctgaaaaaccagaaaggaaggacagggaggccctggtcacgaatgcaccctactccccaggggcccctgaaggaagccccagatgccccttctcaggcctgactgtcccggggaagcaggccagctgtggggagggtgacatgggcaggagcaagagaggaggagagggcgctgggccatccgtctgtccatgcggggacttagctgaagctgaggcaggcagatgccgcaacaaggcagagtggggcagggcagcccggggccatctcgggggttgaatctcggtcttgctgcctccgagcgtggccctgggctggcctctgcctccagcagcctctgggatgtctccgtcctcatcctcaccgccctccctgccacgcaggacacgctgcgggactgcacccacgacgagcgcagctgcctgagcagcctgcagtttgtgtcgccgctgtacttcgtgagcttcgtgctcaccgcgcagttcgtgctcatcaacgtggtggtggctgtgctcatgaagcacctggacgacagcaacaaggaggcgcaggaggacgccgagatggatgccgagctcgagctggagatggcccatggcctgggccctggcccgaggctgcctaccggctccccgggcgcccctggccgagggccgggaggggcgggcggcgggggcgacaccgagggcggcttgtgccggcgctgctactcgcctgcccaggtgggcaggggctggagaggtgtgagggtcgccagagggggggcaccgcagggccagatgggcagcagggccagggaggccttgcacagagacctctgtctttctgggccccaccctgctcagctccatagaaggggtgaccctgtgatgagggggtcggtcccaggccatgggcgcagagaaccaaccgggagggcagctgtgtcctgcccaccccacagccccgggacccggctgataatcccgcctgtccccaccccgtccccgtccgcctaggagaacctgtggctggacagcgtctctttaatcatcaaggactccttggagggggagctgaccatcatcgacaacctgtcgggctccatcttccaccactactcctcgcctgccggctgcaagaagtgtcaccacgacaagcaagaggtaatggcagcccgggaggcctggccccttgtggcaggggcagcacgaaacctggtggggggcctgtccgagggcagagcctggctctgggctgtagagaccaggctgggtcaacgtgggcacacgtagcttccatggctggggcagattggctccctgagtcagggccaggtgtgggcctgtggtgtggtggccacagctgccgaccccagcaccatgccgcacacagtaggtgcttgggtagggcagctgccccaccttgtgtgctgcaggtgccaggcagggagcctgtgtgtcacttgcaggacagcttgccctttctgtgacatgaggggtcatctgcccgctcttcccccaaggcatcatcctggcactcaacctcctccaggtgccctgtcctggcctccacctcagggcttaggcccacccagctcaggggttcccatgggcctgcctccagagcaggcgcagttagccccctcccctctccccagcagtgtgggcccctgagctctccctggggtgttccagcccccagagtggccccagcctcaggtggctgcagggcaggtccccaggaaccatcagcaggagctggaggactgggctgccccacatccctgccctgtggtggctgcagattctccggtgtctctgggccccgcagtgtcccctgcctgtgacacgctgtgcaggtcatccacatggggccatagatgagtcaagtccagcccagtcttgacgggcacttggtctgggggcaagcagacagctgtggagttcacagcccacggcaactcacctgccctcaggtccaggtagcaagatgggccactcagagctggcttccactggaggtggccactgtgtcaccatcgcatgtcacccaggctgggcccctgcacaggatggacacatcatccgtgtccagcaggtgtctggacctttctgaccactgctcggcctctcttcagagcctcaggcctgtggctgcacgccccaggacccaggtctgcccatcccaaacctgggtgacccgaggccaccccctcttcctgcaggtgcagctggctgagacggaggccttctccctgaactcagacaggtcctcgtccatcctgctgggtgacgacctgagtctcgaggaccccacagcctgcccacctggccgcaaagacagcaaggtcagctcccctggggactcctgagcaggcgggtctgtccttgaaacctggcccctgcccacccaggcaggacccccctgtctttccagtctaccatgtaaacggcacccactgtgctaggccttcatctcctgttggacagatgagggcagtagggctcagagaggtggagtgatttgcctgaggtcacacagccacaagcccagccagcactccaacccggcacccagcagtactggctgcttcttgttgctttgagtattttctggtccattccacggggggtcatccctggccggcggggctgtgaggctgaagcgaacgggggagtcatgtcaggcacaagcacctgctatgtgcgggggcggtcgcgtcaggcacaagcacctactatgtgcaggcgctctgcccgtgccacctgtttgtctgccgcacggctctgtgcagcagggatgatttgttcccacttcacatgtgaggaaatggttccaagaagtggggcgatgctcacatcacacagccaggaatgacagagcaggaagccaccccagggggtcagtctgaggaggcctgcaggccaggagggggctcttgctgatcctgcagtcttagggggtgagatctcaagacctgggctcctgatctcaaggtcaaggtggtcctgccctgctgggggtggggggtgtaagggacagctgggggataccctgggcttggtacctctgccccctaggctggccctccatcagctcagagtaggctgtggggccagttcctcctgtcccttccatgtcattttggtcccctccctgattggtaacagttgctgcagctccccgcacccctacactgctctcctacaaaggatatcaggatgcacagtttctgggactcagctggacttgggcagggtgcagtcttttgtgccagactcagcaagtcattggaggtcggggtggcacgagttcatctgccttggagggggcattaaggcggctcttctgggaaggggtcactctgggctgcagggctgaggaatgtgggggccagggaatgcctaggaaggtaggcgttactctccttggatgcagaaacaggctcagcaaagggaagggacccacccaaggtcatgctcatgggacactcgtgtggccactcagcctgtcttctgatgccttcgccagccttgacctggcttcttcgctgggccagggtctgtaccaggggaagtcactaactgcctggggcatccagtgggcattcggaggtggattcctttcacgggattttggaagatggtcaggtagaggaggtgagaggaaggtcagactagacatgagggtagcctagttaagcaaggggccgtggagcaggtcatgaggtacccttcatgagctgtcccccttcccagtcctgccccatcctacctccctttccttgcagggtgagctggacccacctgagcccatgcgtgtgggagacctgggcgaatgcttcttccccttgtcctctacggccgtctcgccggatccagagaacttcctgtgtgagatggaggagatcccattcaaccctgtccggtcctggctgaaacatgacagcagtcaaggtgaggggtgggagccctgccagctccccacagccctcatcttgggcatctgcttcagagggagatggctgagttttttccttagtatttttacccagattattatatttagtccagaaagaaccagatggatatctgacaatgagagatagactctcaggcctgatataacaatgataaaagatcaagagccaaatagtacaaaaagatgaggtaattataacaaaaacctaagcatctaaaggaagcttcatgctgagcttcctaggagccatggtgaaaagggaaagaggtgggtacacacggctctcatcaagcagaaggaaagctgccagattattgtggtgtttttctagagctgaatttgagaggtgtgtagcccacagatcttcatatacacggggatgttaaacataggaaagcctggtgtcttcaatagccgttttgtgaattcctgatacttatccttcagccctacctgcagtgttctgtttatgctttgggcctgtggctgggctctgggcacagggccaggggactaagctggcctgccatcatgggctcatctttgttgtggtcctcatggagggtggcaggaacctggtttcgcatcactggctgtggagggaggcagagagatgaggagcccagcagaagagggatgcccaagactctgagcccaccccaagtacccttcagggacgcctcccaggagccaggggtggggtgactttcctgggcaccctcctgagagctgatgggctctcagctggccagggtggctgaggtgccaagatcccagacttcccaaaccagaattcagggcacagggctgacccgagagccattccggtggaatgcaatctcattccctttagccaaccatttatttacgttttccttaaatggtaagatggtatggcataggaaccccagccaggacattcagactgtccagccgtcttgggtacatttttccattatctcaccctcaacctgcaaggtgtggaggggactgtgggcagaggctgctgctaccccccacgccccccacacccagacctgccccagccttcagaccccccacccccatccttgcccctcaccatgtgcagccaaccaggccagactgacctgccatccagtgtagcgcctgacccggggctgggacgccccaacccacctgctgtcccacagtagcccccaggcctggccaggccccatggtggggtcaggacctggaggtgactgatcctagtgagcacctactatgtacttggtactgagctgggagcttccagctgtttcttctccttatgcccctcaagatggcatcttgttcccttttacagaggaagagagctaggcttgagcccgcgtctgcttgcctccaaaagctgtgtctttgcccagggcccccgccccctggaatcaaaagggctgcttcaggatttctctcttgctctcacaatggggaaacgaaggcttagagaggggggacttgtccacagtctcacagtcagtttattaggtggcccctcactgctggcccagtgagattggtgctcaatgccaccttccaggggctgccccctggcctgagcgtgctccctcagctctgtcttctcctttcccagcagcacccccaagtcccttctccccggatgcctccagccctctcctgcccatgccagccgagttcttccaccctgcagtgtctgccagccagaaaggcccagaaaagggcactggcactggaaccctccccaagattgcgctgcagggctcctgggcatctctgcggtcaccaagggtcaactgtaccctcctccggcaggtaccgacacctcccaggccctagagcactggtctgtgggcaaggggcaggatctaagccaggcctggaagtccaagggactgggaggggaaggacccaaccaaaggccgagggcaccaccgtgcaagggggtttgggaacgctggggtgacgctgagactggagggggaggtggcactggggcggatggagtgggcggggctgggtcctggggacagcagagtgtggggaggaccccaaggcgggtctggaagaggcctgtgatccctagcttgaggggaggggaggagaggaggaggagtactggaggttttgcagggtggcggggtgctggcagtggggaggacaccctgggtgctctgggtgggtgtgagtgggggcttgattactaggaatggaggtgggagggcgggtctggtggatgagaagcctcgggctgcagggtcccccgtactggattggccagggccacagccctcctacccacgggcacacagaggtctgaagcactgagggctccgctgtgggggtggggaaatggggccgggccggctcccacagtgagtgcagttgattcactgggtgactgtctgacccgtcacaccaggctgtgtgctctggcgggcaggacacaaactccctgcctgccgggctcactgtttagtgctgagagtgagctgcctgggtgcaggagggatgataaccaaaataaatgtctgcagagtaaagtctactccatggtggacaggcagggagaacagctcctggggaggggctgcaggtggggggccccggggttgggaggtggggggctctggggctgggaggtggggggcccacggggccgggaggtgggggccaggggccggagcaagtgggagggaccggaaccagtgggagcagccaaggctggggccgcgtcagaccatggggggtgcggtgggggtgccacgtgccctgggggagggcggtgggcccagggcttccccttggagtgagcctggagccttctgtgacgggcagggccgggtctgacctgggtttgaggcggatgctagctcctctcgggggacctctcggggcaggtgaaggccctgcggtgacgccgcctaagctggacgtgcggaggggagaagccctgctccgaagggagctccttggatggggtctgcctgctgcctgctgtgcgggggagggcggcgtccaggttgctggggtgggggccgacacaggcggcctccacggctcccacctccccccaggccaccgggagcgacacgtcgctggacgccagccccagcagctccgcgggcagcctgcagaccacgctcgaggacagcctgaccctgagcgacagcccccggcgtgccctggggccgcccgcgcctgctccaggaccccgggccggcctgtcccccgccgctcgccgccgcctgagcctgcgcggccggggcctcttcagcctgcgggggctgcgggcgcatcagcgcagccacagcagcgggggctccaccagcccgggctgcacccaccacgactccatggacccctcggacgaggagggccgcggtggcgcgggcggcgggggcgcgggcagcgagcactcggagaccctcagcagcctctcgctcacctccctcttctgcccgccgcccccgccgccagcccccggcctcacgcccgccaggaagttcagcagcaccagcagcctggccgcccccggccgcccccacgccgccgccctggcccacggcctggcccggagcccctcgtgggccgcggaccgcagcaaggacccccccggccgggcaccgctgcccatgggcctgggccccttggcgcccccgccgcaaccgctccccggagagctggagccgggagacgccgccagcaagaggaagagatgagggtcgcaggggcccccggccgcccaccgcccgccccgtctcaccttctttacctcaggagccaggagcagacagcaatacttcgtccacacctgggatcgcgcagggcccgcagggcacaggcgcccgacagccgggctgagcggagtctgggttagccaggcctgcgtggcccatggtggcccttccagtgcatatacatacatatatatatatatatgcatatatatatatatatatatatatatgtgtatacacacacacatagacagacatatatatatatatttattttttttactgagagcttatgacttccagaaagtgctaaaggtgggaggtgggccagggcctggacggggcttttgtctgatgctctgggattctggccagacccaccccagggcacatgtcctgcgggggcgtcccagctgtgttttttgatgtctcctccctggttaagagtagcttggagaggaccctcaggcctctgagggcaccaggccctggagaagaggtgcaattcagggtgtgtgtgtgttttttttcctttaaagaagaaacgctgctaagatcccacgtggctcccacgtgtcggggtgtctgtcctgtcatcctgactgtctcgttattgtgaagtctttcgtagacaccccagagcacacacatccccttagtccaccggttagatgtctctctttagaaaaatcaggggtgagtagctgtgtttccttaggcctggggtaggggatggagagcagctccaaggctgagctggggctctggccccaggtgaggtccccagctcctgagcacttctgagggggtgggttccacccccaggagggcgggggtgggtggagcaggagtggaggcagcctgcagaggaagggtgcgggagactgagccggcagtggcttgcttggaggggctagggtacccgcctggtctcggctggctccagctgccctgcaggtgcccctgggctcaggtagttagttgttcagccactaatgccttttatcccccatatgggcgctgagctgtggctgttcctggacactgtgctgtccccgtcctgagcaactatgcccccgccccagtaggttcaaggcaaagcagctctgaccgaattctaggcaggggtgggggcacctgcctgggccctgggtccagccgcatccccatgcccagcctttcgcgtcacctggaggccacatcttcccaccccacctgccagcccctgtctctcctccccgctgcccctaactgcagctcagctttcactatagcagtgcttcccaaacgggttctagacttgggtgtttgatttgaagagttacgcatttatttcactatttattgggaaaaaaatgcattgaacccgtgatttcacagacattttgcttaggtcaaggctactttttaaaaagggagtgactttcatgaagtcagtttgaagaaggaggttgggagcatgttggtggcagtgatctggagaggctgcaggggccacgagtttgcagatgctgtacttcagcaataaccttgcctttgctaagaccccctccgagggcttcaggggggcctgccaagggggggccttgttcttgttcccaaactctgacttggaagaactcagcttgtggccgggctggtgagggtgtggggtgcgcccttcccttttgggctgagggagagggggccgggaggggttgtcaagcccacccgggaaactgagccctggagaggggaagcagccagcccaggatgcttcagggccctggcagcaaagaagctggggtggtgtggagggccctactccacaccctagagctgtgatgctgagcaaggtgcctgtggcggaaggaactgcccagtcctccctgggggcaggtagacctgtggggatggctcggtccaagcccaacactgcccgctccagagagcctcagccctgcctccctttccacagaggtggttttatgtggaacgaggtaccttgtctggggaagaagtggagctgggcaggcttgactgctcctggctgaccctgagctctcgcagttggagggaagcagacagacttgactttttgcaagtccgcgtgttgctggagggacacgtgtattggagcccagaagaggggctgtgtggcctgggaataccatgtggaaggttgggcttcaagttaacaggatcagacaccagtcaagcagcctcaggtcatcttgcgactccactgagcagcctttcctgttgtcacatgggttcagagcagctgagcagggaacacgtcctaggcaggtctgacgtgaaacctccccttaccctgaaccgtgtgactctgcaagcagacacctcgaggcaggtgttctaggcaaagggatgggcatgagcgaaggctccagggtccacagagcagggagtgtggagaaggtggaagagctgagctcagaggcagagaagctccttgcagggagcactgggagatggcctggcccgtcccaggctcctggaggccccacctgccgatcccaggcacttgaccttgttcctgtgggtgacagagatgagaaccagggaagctgtgatccactggccaggacaagtcaacatgggtgagggttgggcaaagggcccttccttcctccccaaccctgtggtctggggccatggcctcaggcttgtgtctatcacaaaagcacaaacttgccctaacccacatgggcctggctgtggggaaagtggggacccaggtccctgagctgtctgctgggctccgtagagcggtggtgggcaggcaccttggcatctgtgcagagacggcccagtctggccaaatcctcttcctctcccctgctctaccttctccggcaccaggcagccccttaaaggaggacaaagtgtgtaaagcccgtctgctgtcttcccccaaatcctcagctcagagccttccgcttccagggccaaccccagccccgtttgctgcgttgtgtaagggcttggggtcttagaagctgctctttagcccagatacacatactcttttttgtctttgtgcaataatcagtgttcctggcagagcctgggccaagctgcagcctactgaggaggcagaggccacctcctccagaaagccctcggcctgggccgccgccgtgactctagcactctcagtcgctgtacagtttctatggtgtgaatgaacttccctcctagttgctgatggcgctggtacctgctggcccatggcccgggtgtagagaaaccaagcggcagccaccaccagtgttgttttgaataaaagcccagaagcctatttaagaatttctccgtgtgtctctgctgttctttccccagcggggtgggtgtcaagctgaggcttctctcaagggaggggtggcagtgtctcctcccccattttcaggcatggggcctggggcgtcggggacctagaacaatgctcatggcagggtgctctcatggccgctgggtggctgggggcctgtggagctggggaggaggcaggcctggttcccatactctgctgctgtggctgagttgctggacccgggcgagagggtcacgtgggaagaataatctgttcaccgtttggcactgtctatttctttttctttcttttttttttttttgagacggagtctcgctctgttgcccaggctcgagtgcagtggcaagatctcagctcactgcaaggatcaagcgattctcccgcttcagcctcctgagtagctgggattacaggcgcctgctatcatgcctggctaagttttgtatttttagtagagacagggttttgccacattggccagctggtctcgaactcttgacctcaggtgatccacccgcctcgggtgctgggattacaggcatgaaccaccatgcccagcctgcactgtttcttgagtaagtccccatcagattgcgctgacccaaggacagggactgtgtttactcctcccacccggagcctggtgcaggttgagattcagcaaatgtcagctccgtggctgtgttttggaagcagaagggatttcaaagaccaactaacaccttatcttatttttccacttgaggaaacaggcctggaatggcagcagggtgtggtctgggccacacagcgaggcagaggctaggggtgacgggcacctgcatgccacctccacagccagaggctcggcccctggggaggagaaccctgatttgtcatcctctctcttccccgttaataatgggattaaaagcaagttgctgccaaggagagagactggctttaaaaaaaaaaaataacacaagaacattttaagagaatgaaaaacttcagccatcagcactttttatttagacccgaattcatgaattttaaccaaataaacacaggcatgttaggtattaatatatgtaagattatgcaaaaccactattatggctataatgaaaattagattctgactcttgttgtgctccaggagggaggcatcctccggtttctagcgcagtgacctccgattgctgtcaccatggtaacaggctgccgtgggaatctgtggaggaggaggctggtcctgtcgggaggggtgggggtagggccaggccgggctggtgcggatctgccggcccacatctgcacagagctaggggcgtttcgtcccctgggcagaggccagcctgagcctcagaggagagggggccggtcatcagcaggaggggaatggtggggcagaaacagcagttgcacggggccccgccccactcaccctcatcttcctgttcccctcaggctgcccctccagggaggcatctgtg

SEQ ID NO: 77 - DNA, 143661 bp, Homo sapiens
  source 1..143661: mol_type = genomic DNA
aggctgatctcgaactcgtgagctcaagcgatcctcctgcatcagcctcccaaagtgttgggattacaggcgttagccactgtgcccagcccccagtttttcagtataggtatgtcccacacaatagttgaaacacttccatactaaaaactcgttcatgatctgaaattcaaaatagggtgttctgtattttatcttacaaccctatccaagattgcacggtctcttgcaggccatgggagctgtcttgggggttgtggattaggcattgctctgcagccgaaccctgcagaggagacagaaaaagtctccatcttggctgaggcctcgaagccccttcatctatttagcatccaagctccccaacccttggtggccacctcttctctaaaatctttgctggtttttagccttctcacctggggggaaaggctttctcctcttagtttgctcatctgtggtatggggatacactagtacccaccccagagactgtggcgaggactcagccaggtcagtgcgcagagagcagagtgttgggaggagagagaggactgtggtgggaaggcagggacacctgtgctctggtggttacaggttataattctctccacatgagaagatcgcaaaggtcacaccttctagggtgaaaatgaactagggcctaagcttgagaggattcacaaaaatgaagtttggcctatggctccagtttaagcagctgcggcctcaagctcctgtgggccaggagggagccgttgctgcacttgtggtcagggcttcctgggccgtagggacactggccaggtgctcactcatagctcccggcagaggccctgtcaggccctggtggtctgaccagactgccagatccacctccccactaaaccagcatctctgatctgtcttcttccctccagggtcctggctttcaggctctgggagggtgtttgttttgcttgtattttttttttttctgagacaagagtctcgctcggtcatccaggctggggtgcggtggcgcaatcttggctcactgcaacctccgtctcctggggtcaagcaattatcctgcctcagcctcctaagtagctgggattacaggcgcatgccaccatgcctggctaatttttttgtatttttagtagagacggggtttcaccatgttggccaggctggtctcaaactcctgacctcaagtgatctgcccgcctcggcctcccaaaatgctagattacaggcatgagccaccgcacccagcctgtcttgcttgtttttaaaagacagctttttgagatgttatgagacaatgtatgtcaagggcctggcacctattataactggtggaagcaagtgccatgccctgtggttgacagggacctgggctaccatggtcttcaccccctgcagagcactaagtgggactctgaggtcttggccaactgtcttcatagctacccagtcctcacccccaagctgatacagtggatgggaaccatttgaagtgaaaatatgaacattatttaataactgatcttctgtaataaaccatttgaaaatattttacaaggaatcacacacacgatattttacaaagtttcttgacttttttgtcgctgttgtttttccaacttgtctgtacaaaatagaacaacaaaaaaagggcagagaaaaggaaatggccccccagtcccccagcccaaggtgaggggcagccaggtcgggtgggtaatgagaaggattagacccagctgggggttagacagctacctgatggggattgttttgtctgtttttctgttttttaaacttaaaatatatatttttctgtatatgtttatattctccattgagcacctgactacactacagttacacgcacgcccccgaaggacacagctggcatccaggccgggtgcacatggacacccaccctggcaccagcagtgggcatggaccacacacacacactgagaaagcgacaagcaacatgacattaattaacgaagccattaattaatgcatcaccctccccctcctcccagtccatctgagccccatcactatatccccttgccctcagttccccactggcccccaggctgggatgcctttgggggaaatgaccagaatgaatggtgtgaagagctgtgcccagtccccacctgtgtgtgtgtgtgtgtgtgtgtgttcagcaagggagggacagtttggcctcctgcaagcagggagtgtgtgtgtaggggtgggaaggagatagggagtgggcacaggcctgagtgtgtaagggccagattggcggaaggatggcccagccaggagagacaaagtcacccctgctaaggcaaagggtgatgtctggtgggggttcctctgccgaaaggtgcaggcagtggcatgtggtcccactgggggcctgacactagtgagaaatggttacaatgagcacctggagaggtgagggggcacttggaggacactggtggctaggggtgggacagagggttcttcaccccctgccccagcatttggcactgtttgacattcagctttagaaatgggaggaccagccaggctgcagctcagattagaggcaggtggtgagcaggagatggagtgtgcaggtgccaaccctcccaccaacccctcgccctgtgtaaggctttgtaagcccctacacccaccccaccccatagtgtgtgtgtttgtgcgtgtgcccagtggggtatgtcgaatgtgagtccagtttccatcctcaatgttccaggtgtatatggggtagtgtctgaactggtatcactgtgactatcctgacacctggtgggcttggggatgtggctgtaggcctgaaaggggcaggagcccatgggggctgccccagagcctctctcctgctaggatttaagctgggaggcacaggcttcaaactggccatctcaccttcctccactattctcacagaaaccaagtttgggcttgggtggggcagagaggccgggtcagctgaggcagggtcccccccaacataggcagcctccaggaagggcggcagcagaggcctggttttggcaccagtgcgtgtggcctccctgtcccatcccactggggggagcccagcaggcaagaagggtctggggacacttgaacagttcggaggtgagatgtgatttgggtgccaaacacctgcggcgtcccgctttgggactccccatcccaaggcgcagaccagactctcagggcctggccagctcaggtccttcagtgagggagggacgaggctctaaggcggggagtgtggggcaggagggtgggaaaggcgaagaggccgggtgaggtgggagtggaggtggggtggggcagggtgctcagaggcggcgagaggcgtggacgaggacttgaggctgcggccggggcggcaggcccaggaggagcagcagttgcagggagaccaggacgcccagcgacggcgggaaggaggccccgcggccacagtctgaggtatcttcctgcggggagagacaaggagctggtcggcctgggcgggcgcaaggccgcgggatttcgggtccaccgccccctctcctcactgtcgcgttgtagtcgaagcagatgtgcgggcctctccggtatcgcggtctctgcactagctcacactgctccgggccgtccgctgggcatgggtggggagtcaaggaggcggacggcggcggcggcacggagggggcgcgcggggcagagggggagcgggcggcggggagggcgggggcaggatacagtgcgtctccttctgcagcagccggccagcctcgcactggctgcacagcggcttctcggccaccacaaagagaagattggtgttggtcagtctctgcgcgtggaacagcctgcgggcagcccggaaaggcggggcgttgagtttgccccgccctgacccacccccatcctgcggccccgcccccggccgctcggaggccccgccccttccatcctcccgagcgtctcgccccgctcacaggttccgcccttggcctctggtcccgccccactgccagcacctggagcagtttccgcagtcgatgatggcgttgtaggaggcgtttaccgagccgaagtagtactgggtctgtttcatgacgcagctgctctcgcgcgtctcggggctcccctcggcctccgcggggtctgcgagggcccagagcgcctcagctccgcccacagaccctggcaaggtctccggcctccctcagtcgtagaccccaccctccccatggagtcgtcttagctcagattggggacccggacttgaggaggcgcctccaaagccctacctacctgcttggaaccagctgtggtagatgaggccgtagagaagctgctggaacagggacctgcagcgcacggggagccgagtgcaggtggtcagcagaggacgatgccatgccctacttctcttctgagccctcccggccagggagcaccttctctacccacctcccgctcaggactcaccaggcggcagcagaggtccaccaggccaggttaaggaaatctgcaacggtgggctgcagtggagagaggggcgtggactgccactgctgcccctcgccctaggtcacccccagctttatcaaatgtcagaggtagggggtcatctgtgggcaggtctcccagtcccccccatctccagtccaggcatctctggggactcaccacaaagacaccccggggtgcagcacccaggttgccagggggctgaggggcacaggctgcctgatagtcataggactccttgcgggtgtagaaggagttattgtagagtgccagcatcaggttggcatccacctcactgaagaacctgcccacctgaggatgtcaggagaaagccatggtcacagggctggcagtgctacacccctagaaggctcaaatccctactctcttctttcactctcttcctgatcctcacctggtcccactgatggttctggtttgacagcaccaggaatcctccatcatcaatgaggacacagagtaagtcctaggaggaagggaatggggaggaaaatggagaggggctgggccccggaccttccaccgcaggcagtccagtggttcagagttggggggcatcactcccccagtcctgggaaggctgtgaagtcagggtggggatgttgagacccacaggccaagggatgtgctgggagtcgcggctgggactaggaagtctggaagtggggtaagctagggtccagggtaggttcagggcacacacacctcattgttaacctcgcagtccatctcacagtggctgttggggccgcactgctgggcagagagtgaggaccgtaagccacccaccagttttcctccctcccatcacctttcatacatccggttccccaggccatctgcagctggccctgcctccatgtaggtgttggagccactgagtggagggttggtgggggttccaggggactccaggaagggcactgctgggttactgcccccgcccctgcccaaataccttctgaggctggtcttggtgggtacggttgctggctagcaccttgaacttctcagcccaagcctctaggtccagcttgacgcccaccactttgggggagagcaagggaccatcagtgctacctgcccaggcagtaccctgtccattgcctgtttccccacctctgtcccaaacattcacctgctggcctcagtgtgcgcctgcctaggctgagctccacagctgtgctgacgaggatgcccacagtgtcattctccagctccagcggccttaacagggctgggggttgggtggggaagtcaggagtggggtctggcggccacactgaccactctatgctgggtcctacaaacccagcagtccaatcccgggatgactccagcccaagcacccagcactcaggacagtgtttggcacagtctatccctcttttcacgtctgccctggcctcagccagccttgtgttggagaggggcctcagacagcagagcccagttctggctgagcagacagggaagctgaggctccctgcctgctgctgggcacactgcggggacactcaccatcctggtgtgggggcttgaagacataaccgtggttatccaggctgcggcggtagaagctggcattgaagggctcagggttctctgtccagtcctcagctgccctggagcacccaagaggcagactggtaggtaaggggtggcttgtcggggacagtggtctccacagatgcaaggaggcctctgggcagaacagatgcaggttccctggcaggggcagggtttgggtagtgggataggtcacttacttgttggggaagactcgggtgatgccaccgtctgtggcagcgaacacggccagtaggctgtacctgggggtagcaggggggtggggtcacaggcctgccttctgctgggcaggtccagggcctctgggcccatcctagccttctgcccccacaggctgggtgatgcctacgtgttgagatcctggtccctccacacacgctctaccagctgctgcgtgatgcccgtgtccaagatcaggttgtgcagaaggaagttgttgcctggaacaggaggggaggggtgggggtgggggcatcttcttgcagctccttgcccaccctcacccccacccttaaggctccaccaggagcctcctccatgacctggccctggcccaggcccagcccttagcttgtgcctgcttatttccacacctgcccggcctctgggttcctctgggctggccccatgctgcctgggcactgcccagagccagctgccctgccaggcactcacactgcttggagtctggagtcactttctccatgagctcaataaagtttttcaggaactcggtgttgttgtctgaggcattcaggtccttgcagtactctctagggatggggaggggcaagaagagtgggcttggggggctggacagggcaatggggtcaaggcttcccaacaggcccacttggccattcactgagaagcctgggcctcagggaggggcacatgggttcttcctggctgcagctgctacatgcctggcaggctgctcgggtctgagtcggggcagagctgacacaagaatgagggtctactttctccattcgggcagctgctttctcctgggcatggctccgcagagcctcccgtctctccggtgtagctggacccagatagtgcacctgaaaggccccaggaaatgcctggcggcctgctcatccacgtgtatgccctagagcattcccatgggcaccagatgggacccaagtacaagcactggctttttgtcagcctaagacctcaccctgcctcttcctggctgtgtgccgttaggtaactcactcacgctctctgaccctcgcttttttcatcatagcacagagggtgtcagaaagtcagtgggaacatgtgggtcctccgactggctgttccctctgcctggaatgctcctcccctcaagaccctcactgcattcaggctctgggtccagagaacatggggctgtggggcgtgagggggtctgcttggggcttgctgcctaggaagtcttgggagcaatccctctaccctgataggtggagctctctctcgctcgacccctcattcatacctctgccaccagggaccgcttcattgtcccatatggcactaactgtggggcttttgaacgtgtgccacttccccaagctgtggtagggctcatggcttggtaagggcacatggaactgggtctcaggccccactctctccttggcccccagggcctttgtgcagtgtacagcctgcacctctgtgcctagaggccacattggacacacccagggtgacacccacacgactgtgcttgagatacaccaagtcacttgcagtctctcctgtatacacagtatgcacgtgcacatttgtgaggtacttcattcactcaccctccacgtatttattgagctcttctgagccacagacacagagatgacaaaaacgaatagggtccctgccttcaagagagcttcctcagggtcatgtgggccacataggtcttttcacaccttcccacattcactaacacacagagccacccccacatttatgctcagactcttacatatgtacatggtgactcacaaatacacacatctacagagagagtcacagagaaactgggtgcatgcacatacgtgcacacacgaaggtgaggcatgtccagagcccccgtgtgctgccttccagtgcccctgggtctcttgtcagctgcatccacccacctgccctcatcccaagcctgggtcatggaagggcttcagcacccaggggacccggcctccccagacatgggccaaaggcagacggtgtgtacatgagaacgtgtgtgtgcacactgagcgtgcactccgggatggtccaggcctgggcttgctcggggccccgtctcctcatctgatggagcagctcctcaaagcccccactctcctcccccaaccccccaagtgaagtaccacgcctagacccggcactgccgacaggggctctggctggctcggcccccagacccacacgaacaccgactgacacaggacaacgatggggtgcggggttggggggatgggcaggacaccacaaaccagagcagcagctgcctggcgaggggtgggcatgccacagacagccaccccagggcggaaagggctcctgcctggttgcctgggagggcagggaaagtcagcagatgagtctggagccctcctgccccggcctggtgggagctagggccgtgaggcagctggccactgctgcctggtgcggtacatggcctgggtatgcacacagccgcgcataccgggcgatgtatgggggccgggggatgacactgcacaggacacagacacacagagctccaggcagcagtgcaggaggtggggccggggcggtcagggtaggggaggacacctcagcaaggccacacgcaagctacctgggagcaatgaaaacgtgtccttcagactcaaagctgctggggagcaggaactcaaaatctgcaacagaaacggggggttatccggcgggggctggggaggctggaggccggggggctcagagctgacggggctggaaggacaggggagaggggggctggagggagggggagacaccagcaaagaggaaacccgccatttccacgtccaggagccagagagaagggacgggcagggagggtggagggcctgtggagactacagcatcgcaggaggagggcagttatagccaatatgttgcccgggcctggtcctctgtcggcagtgagtcccttggcgtggctgtatatgcttccatacggctgtatagcacatatacacggacacacacacacacatatatatacacacactgctatatatatgcatggtctgggggaggcgccagtctcgctcttatcacatccataatggaaaaaaccgcatgctgagcttcctttgcctccaaagagactttgaggaagggaattggcttttggctgcggatttttctctctctttctttgccgcagctgtttgcgttttggtaggtcttgcttttgttctgtgtcaggcatcaacatggccaaaccgagggggtttctcacgggcacaaacagtccaaccagagacgggtcggggcagctgagggttcactgcagtgcattgtcggggctggtggtcctccctgggctaggaggtgaagggagaccctcaaagtgccaaggagtgttcccacagtgtgggaagaaagtctgaggagctggaaggaggacaggggtgctgctggaaactgtacctgcttcccttggctaagggcgtggagacgggctgggtctccacccttcctaaaacctgtctgggctccaggcagccatgggggatgctagggctccagagagggcatagggctgctgttgaggcatccccagttgggcctgtgccctgggcttatgagctgtgcatgtgtgggtgagtgagcatgcatgtgtgtgtgtgtgtgtgtgtgtgcctaagtgtgagtatctctgtatgggtttgagagtgaacctgaggatgtggccgctggggctcctctgtggcctctccctgcccagctggactggccaccttgctggtctgcacctgggaggggtccctctgctcttggcctgtctcactgtgggtggtccaccttcttagcctgtctccacttctgagctctcttttgctcccagggctttaattgtatagaagacagattgtccctgataccaaatactcccacaatgcactgcaagattctggggaagggggcacttggggtgcttggaggggctgggcagtcactggttggactgttcctttctgataggactgtgaggcagggtttggacacaagccgatggggaaggggttggggggaagaggagaaggaggaaaaagaaaaaggagggcgaaggagcagggaaggagactatgctatgttgtcattgttactagggccctgcatttctggggtcactgggtgggatgtgcgggggtggggagaaaaagacaactcaagccagtgggagtagggcacatcccccacccccgccctggccactggaggtggctctgatccctttatcccctttgctggactaggctggacagggcccctagggcttcttgggtgcccctgcttccaggtcatggggacatcctcttgtggctctccatgccccatctgcccagggattccctgggagaggtggctctctgagacctttgtaatgctgtcctctctcactccccttactctctgccagggtctaggggttcactacccactcttccagaagtctccttggcttaggcaccccagtgtgccagaacccttcctttcatacccagcctgatttcctccaaacacctttgctggctcttggggtctaaacagatcccattccatccctgtccaggcccctggtccccaaatctggttttatttccccagggaaacaccttttccatactgccaagccaccccggggctcagcaaagcctctggaagcagcgggccggcaggacacggggacatcagcacctgtgtcagtgcccaggaggcgcgggtcagccctgctcttcaatggctggggcctgccctatgctgccctttggccccagcatcagggcgtgaggcttctgagccttctgcctcccttcttggagggctgccagcttctgaagctactgccagagatcagaggagggagagctacctcagagtaggccttgtgggctggccccttcccacagcttcacatgagccccactaggggctgatctaccccctgcatctcaggcctccagccctgctgagtgggaggtggtggagaagcgtccagactgtccctactgttgagttgtcttagagggacagagaaggtgggggaggcaggggcctccccagagagagtgaggggtccaaggaaagggttgtgggccctgagaacacgccggagaacaccctgcaggcagggccaggggcacaggccactggctctcataggggcttaggaatcagaggaaaggcaagaactagaggagccaaggggaagctgggagggggccctggagagcaggggtttggctggtcctgggcagggaggggggcaagcaggggcgtgaggatgggaggggtgggaagaggagggtgcactggttctgaatatacttgcccttcagtttgctgattggcactgggacagtccaccaagagagaaagcgaggaaaacaaaaacaacacaaacacaaaaacaaacgaaaagggggagggaaaggggaggggcacaaacaatattttattcaatggctgtttgaatgaaaatattgtgtctcatcatcataccgaaaggaaacttcttgcaaaaaacgacatgagagagaaagagagagcaagaaaactcaaaggagatgagcccccagtcggccaggcaggtggggggcgcccggtggggccggagccccagcctccctcccagtgacctcgggcgtggtgggcaggcagggccacaggctctagagactctctcaggagaggcccaggatgagcagggcatgcaggggtgagccacaggcagaggagtgggagaggcaggggaggaaggaggggggccagggagaaagcagggagggggagggaggagggggatggggaatgaaggagggaagaaagaaggtgaggagggagccagggggcagagcggagggagtgtggggagtgggactgaaggggggggggtgctggggtggggagagcgggagggagggagagtgagagagagagatggaggaggtgagcaggagaaagagggagatagaggagatgcagggagaagaggagggagagagggaagaagagaggacagtgcgtaagggagggaggttggatgcagaggggagagaggtaggaagtgagaggagaaggatgagagggtaagtgggaactgagtgaggatggatgaggaaagaatggagaggagggggcagagagagagagaggcaccatgggaagggggcaccacaggggtagagagctgaacaggaagagagaggaaagaggggaggggagggagaaagaggggaggggaagggaaaaggggggaggggaggggggaggaggggaggggaaggactggagggagaggaggggaggggaaagagggggaggagaaggggaggaagggagagggaggaggggagggggaggaggagaggggaggtgggattggggaggaggtaaggggaaggaggaaggaattgaagggagggggaataggtgaagggaagggagaggaggtggagggaggaaaggggaggggggaaggtgaggggaggggggatggtgagggtggggggaaggggagggggaaggaaaaggggaaagggaaggggaggggaaaggggagaggagagggacaggaggagggggaggagaaaggggagggtagggggaggaggagggggaaggggaggggaggggaaggggagtggaggtgggtggggaggggagggggaaggtaaggggagggggtgtcttccaagaatgcagcccccaggagtgtgtggggcaggcaggctaaggagggaagacacggagtaggagaaaccaaaaacagcaacctcaacagaaaccatgaaagaatggtctggaaccgaatctgagaaaaggcaagcatgcagatttccacagactttcgaggtgccccagcctgcgggcacctgagggtgggcagactgggcaggagggactgcctcgccggcaagcggcgctggctatgctgcctggggccggccagggtgcggggcagaggcagggtgcagggcgcaggcaggggccgggccacttacacttgacctgcaggatctggtcactgagattggcttggaggtagaaggtgctgtagggtgggagcaccagccccaggctgaggggggagaagctcgggtcacggctggggggaggcgggccacactggcaccccctccccatggccttggagctgggcagaggccccagctgcagcatcccctcctcccaccaccagggacccctctccccgcttagctgcaggaggttcatggtctaggggccggcaccctggaggctctccacttctcaaactctcctgggggccaccgggcaaccagccccaaagcaaatccccacaccatctcccctcccagcagcctctcacaacagccccctgcccagccaacctccctctgacccacaaggggcagacgctgccgtgagctggctgcaatgccagtgttgccgtgggagtggggtcaccagcccccagatactcaaagccagcagaaagcagggctggcgcagatatggtgggggcagggggtggcagttgtgggctggcatgggctgtgaggatgccccggcatttcaggatggactagctgtgtggggcaggcagaggtcagcctgcactgacccagcctgacacacaagggacctcctctgccctgagactgtgaggcaggctgacagcatgccaagggcagtatcctgggatgaggagactttggatgactgtgctgtgctctcagacctgctgcttgttccttaaaagccagggagtctcttggcagactaagcatctcagggtgagtagtgagcagccctggccactggtgccccactgggatggtggtcacagtgggagagggaggggacagctgggctcagattctggggccaccccaccctctctgcccgcccagccctggcctcacttacctgtagttagtgctccttataggcacccaggtgtagttccgtgtcacctcatctatgtacctctgggagaggaggctgggtcaggtacttgggctagcaggcagggggcgctggggtagaagggtgcccaccctgactccctggcccccagccctgcctccttacctcatccagggacttgaccaacgttctgatctgcttgtggcccttgttgccatcaatcatgctccgacggatctggaagggccagagatgtgaggggcagggcccctacactcctctgctctgtcccccacccctgttctcctcctctccttacctcttccttgttctcatcctctagctccgcatccaggaagtccagagtcacaggctcccggaagttggtggtctgttggaggcagggtgggaagtcagaagtccccattgtggaaggtttgcccaccctccaggccacccgtctggctcacctggggcttgagattggggtgcagcaacacgtagccgttcaggtcaatggcaaacacatagccgttggctccaagctggaggcacagattgggggctcagggtctggagggatgggctggggttccctgggctccggagttcttccctatttggcctcccaccgcaccgagagattctgtttgcctgccttgggctaagggcccccccatgccacgtggccctaagcctgtctctccagccaggcccgcaggcgggttgccccttgtgcaccagcccttgccaaggctaaccggcgtgtgggctgctgctctgcagtcctcatcctctccccctggttctcatgagctgtcagttgtcctgacctctctgccaccaccggccccacaggtctgctgcttctgtacccctgtggccctcctctagccactactgcccctgatttgtgcctcctccttgtccccacgtcaagagagagcagcgggacgagtggacccttcggaatcctacctggggcttcccttccaggtggaagggaagtaggagtaagtgggacctggacctagcccttacctcccccagtcagtttcttactgtacctggaggccaactgccacagcccctgcccactcagggccaagcagaggcttcaggggggctcaggcttaatgatgctgttgtacataccacacctctcccccttccacaggccaagatgcagactccctgaccgcaggcgctgggccagccacaatgccatcttgcccctaccctggtttatgattgtttttcacctttgggcccttggccagagaattccctctgcctccaatgtacgccatcccctcctttcctttctgcctgggacactcctgcctatgtgcatgggccaggtctggcctgctgcccattactatgtggccatgagctaagaatggttttatgtttttaaatggctggaaaaaacatcaaaggaagaattctattttgtgacatgtgaaaattatctgaaattcaaatatcagtatccacaaataaaattaaattggaacatagccatgcccattgtttatgttttgtttgtggctgctttcacaatacaacagtgcaaccgagtaagagatgggtatgtaggtctgcaaagcctaaaatattcagtctggccctttacagaaagtttgccaacccaaggtcaccttgttctagacccaaggtcacctcctggggaagccttccccgacccctgaactcagaggtctccatggaggcgctgtaatacccatcagtcttctctgctgagcctgcctgtgtccacatgggaggcagggtacgcggatgggcagggggatgctcaccgtgtagttgggggtcagcctcttgatgtcattcagagccacgtcaatgcccatcacgcccaggatcagctggttctgggagcagaagcatggggggctcctcagtgagctcaattccatggggaaccaccctccacaaggcctcaagctgctctcacaggcagtgtgcaggcctgccctgcccctcttccaccctcagacctgctgtgggcatgcccattcctccccaggcacacccatagccccaaccctcccctttcctcaccttcttttccccagggccatcctgtgtcaggttgaaaacagggagggtccctgttaccaccaaccccagtccctgaagggagaggaagatgatggagtcacctgtggccagcactgaccccaccctgagtgttcagagcagggactgaggtgcaggccacctctttctcctgtgcttggtttaccccataagggggccctccagggtcttgaccctgtgggcacatctccgggggaagggtgccagccccaccccttccttgtccagaggccttaccagtgcatcctcatacacgttggtccactgcacctgcttggcctccttgcctgccagcaccatgggcctgcccaacacatctagatattcctggggagggggcagtggtgggggtaatgagtgcctttcccaggcactgcctgttctgtctcgccaggcattgggattgtgccccagccactgtgagggggcgcccttggcccacagcagcccatggcacacagcgtccctgcagggaagccaggggctgggaggaggggcctccccaagtctcacctgtgtgttgatgcggatggctccgatggaagggatctcaaaatagtagcctgtgaaggaaggagaggcagaggtgggcctggctggcactgcaggatccatgtgcagagggccctgcccctggggtgtgtctgcagccctgcctcgcctcttgggctcctctctttttggggtcctctccctctagtgctcccggcctctgccctgccaagggcggtgctatggagagggagtgagtgcagcagtatcaggaagcagagcagggggcagagatggggagggaggagcctgaggtctgaggtccctcattttagggtgcaatgccattcaaagtccacccggcagccaggcccaagtgcacagagagatggacggatcagcaaacagacgcaggagtagacaagctgggggacggttggacaatggacagacagacgggcaaaaagaggctcagttaggtggacccgttagcccccagatagagtgagggacagcctcgtggatgggaggaggcacactgtcttgcagcgggtgaacacacagctggacatatggatggccagttgaacatacgcaatcgacaaaaagaaatggcaggcaggcccctgacagtgatgcgcaggggaggtacctttgttggcacaggccatccactgcagcggtgtgacgtcatagttatgctgccccacggagaaagtaaacacgcgcacctgtggggggtttgaggttactgctgtggccaccaggggacagccctcttctgtactgggcccaggtcagggtagcccctgcctcggttgagcctcaccgtccggtttggccaattgtacttctcaaagacgtcctgcacgcggtcctcaccaccatccgtgaacatcatgatcatcttgttgcagttggcccgagtgatgttggactgaggggagtgaggcggaggcaggcagctctcagccctccctggtccaggggcagggcctccctcccgcagtgggcctggacctctggccctcctcccccacagcagatggagctatctgtccaagctgcctgtttggtgctaacgaggccatccgtcttgatttcctgggtacaccaagccagggccctctactcccccagccgcccacttgcccacccatggggctcacgttctgcagctggtcaaaggcatactcaaagccggccttgtagcctgtggtgcccttggccaccatgccctgcacagcttccttgaacaccttcttgttgcgcacattggcctgcaccaggtgtgtgaagcatgacacaggctgtgccttctcgttgaactgcaggaacagtagggtggtgagtggcctcaggctggccggggtaggcagctattgcatggggctggtgatggtcacaggagcagggcagatggggtgacccatttcaccccgtctgccaccttggcactcaccgaggccacattcacatagtcatcatcagacagcgtgtccagcatctcgcagacagatgtcttcatcagcttcagggtcaggccgctcacactgccactcctggagaggtcaggcaggggacgtggaggagccaggggaacctcacgtgttctcctgcccatcccccaagatgttcagggcagcagagtctagcccattgcccgtccctgccccagccccacttgccagcactgctcactcacacatccacgatgatgaccatgtctttgggtgacgaggccccctggatatacctgcccaggagatgcctctgttagggtaaggcccactgggaccttgtgggtccttccttccttcacatacatattgattcaatacatttctcttgagcatgcactgtgtgggccaggcagggttctatgcaccgatgataccacatttaacgaaacagacacagtccttgcccatgacatgaatggtctggttcctcagcaaggaaaaagtaccagggggtatatgagcaggtgatccccagagggggcaggagccacattccctggcttcagtggcttgttgtgtcctctgcctcaggttggggccccgagggcacagtctagctgtgtatgggatggtgcaggtggcagggaaggagagtcacagggagctgccggaggggcagaacagaggggagggatatctggggctcagacgggtggggcagggactggccaaccctacagaggctacatctgcctttggggaccccttctggtccaatctcccttccaatctctcagtcctgagtgggtgggggtgctgggcagtggacggggggcatggcagctgggaggcctgcctgggtgatgggatccattttccagtggcaaccatgtgtgaaatgaaaattggatacagctggctgcgccctgctaggaggcttggaaatggggagggaggggagcaggcaggaaaggtggggaactgagggggtgtccctccccagccccttcttgctcgctcaccagggtctccttcggacatcgtacaggtcgatcttcttgggggctcgccacggggtggctgagggaggagagaaggtgagggggactggcaggaaagggctggcctgggtaggcagaccttgcagaggcgactgggctgccacagactacagagaagccaccccgccccatgcccccaggatgggtgggctggtagatggagaaaggcgaggtgctgggtagacaggggacaggggctggtacctacccgggtagtagcgagtgactcctgtggcgctgccgaagacctgccacagcagtgtggggtcttgtctgcggttttccatgaacacattctccagggcctctgtccagttgagctcattgaggatgacagtggctggggggaagcggggagctggggtggggagcacctgggctgtgtcctgtcgaacccaccaccacgacactcatgcctgtgcccccatttagaatcccccaactgttctcggcctatccaggccctccctatttcctagggcccagctggggctgccccagctcctccaggaagactttctgatcctcacccctcccaagctgtgaaaggaacagttcagcctactcttcctccaggtcccacatgagcaggcagggcagctgtggctggtagcctctggagaggggctgcccaggtggctgggtgctgggaactcggagccctcagtccagcatgctgcctggagctagcactggtcccccaggagctcacccattcagcatgcactccaggcttcagccacaagaaagcaattaagggcctgctgatggggctggaattattcagctattaagttacctgataagctggaagccactcagctccatgattaatcaactggggccagaagcaagcaggggtgggggcgggggctcttggaggggcaggggcatgccagatcctgcttcaacacaggcaagtgtacttgtacacgcatgcgcacactgcacaccccccaacaggtatacctgtgtctaacctgtgtgtttccagccagatggaacccacctgcctagcaccccagctgccaccatgggcacaagggcacacacgttcatgcctacacaccactctgcacctacaggggacactcatgggtcctgctcacaaccccctaccatcagttaccccattctcccttccccccaacccttgtagttgcacgtgtgtgatcccctgtccagatctatccctacacacacacacacacacacacacacacacacacacacacaaacaaggctcctctcagagaatggactccaatcctgcggacccttcaacctgggcagagatccaggatggtttgagcagtaccctcgacccccaactcggggcggcctgatgtgtgtgtgtgacacatgttctcatgtgtgcagtgaccctgtccctggacactaggacaaaacggcaggagtgggacacagctgcttctgccaggcctctgtgcctccttcctccttcagggacccccaccctctttcttcccatgtggagcccagccaccgtcaccccgtacagggatccccatcaaaaatctacctcaagtgagcaccagagaccacctgcagcaggcagacaaaggtagaaagcatgatttacagttctctagcctctgctccggccctggggcactgacacactctggggcactctccctcgggcggcccctctggagcgtggagcctctgctgcgtccgctgcctgatccctgccccctgctcccactcccttcgctgtctgttcctgtggcttcccgtaactgaccataatgtgaaaacaaaacacatttcaagcattggctctgcttattgaacagtatgttatggtcctgttcctaatttagaaacttagtgagttgaacaatttctatttttctctctaaggaaaaaataaagccaggccctccagagtttcacacagtactgtttgccctgagagagtctgcctggcaggtcccacccctcactgtgtctcggttttcccatctgcataatgacaggcttagagcagaggggtgtccctggtccaggtcaagggccaagaggagacccctgctctgcgtgggctgtccatgcaggtacctgtgaccccacacgcgcttacccatacacggcaaggcacactcgcgcaaacacccctgcgcccgcctggaaagggcctgctactcagccccatgcgcacagacccgtacccacctgcacatactctcagatcatgctgagttgggaaaggggaccatgcccccttaggcaggtgattacagatttaattaaaagtgacacagtaaataaaaaacatataaaatgcaatttatgtgggtagcgaggggtgactggagagggcggtgtggctcctgttttaattagtgtgcctgcctgtgatagtgcccctcgactggctcgggcaggtggcctgcgggcagcctgtggggagcaggggggagcatccttccccaccctggcctgaggctgcccagagggcctagctgaccccgagatggagagggcctccctgaggaccctgggaattccctgcattatggagctgaggcagtggctctggggcttttgagtcccagcccagtgggctccttggattccaaggctactctgtaggtgcccatagaactgtgtcagaaacaacaggcctcagtgccttcaatcctgctgctggagctccccatccagtgtttgactcttggtttcctcctcctttacctcccaggagcttcaggaagttcctcctcatgtctgactcaaatccttctagctatagtgacctcgtttccccattgtgtaaagctgccttgtccctgaagcttggactgtcaaccaccctcttccacatcccccttccttatatccccagctcctggctgctctgggcaggaaaactccctacctccttggttctatgcccaggagaaggagggtagtgtcatagggttggtatctgtgaggggtggttccctgtccccctaccctccgtgtccacctgatgtgttgcagcttgtcaaccactcctacttgggggcagggaatggggaagggtggtgaggagttgcttcaggggcaggcgggcactcagtccaacatgtggggaacggtctctgtgtgcgtgcatttgtgtgggtgcctgtggacacgtgggcaggagaccatgcatgcacagggatagaggctcagtgttttgcaacttgctgagtgttagggtgaggctctgcctgtaagtgcttgatgcccacatgtgggtgaatctgagaggtgcgcaggagtaatctcaggtgtaggaggctggaggtagatggcactggccttctgtccccagggactctggaatgccctggcagtgggcctgcccccacagcaggtgggatgggctgtcccgattgctctgcacactcacagcctttgtagatgtccgtagggatctgtacagccgcgtatgaatagttgaccttgttcttgaagtttgggtcctcgatgaagtccagccttagggtgctggccttagaccccctttccacatcctcactctcagggtcgtcctgcagaaagggcacccccgagcaatgtcagggctggaaaatggtgaattgggttgtagaggcctgcaagtaggggcagggagggccagagtccaggagataggggcatctcaaaaagagagactattgcagtaggagacacagatggagagactcagggacagatggacacggggttggacccctcacccaaggggcctgtgactcccatctccccctgcccaccccacccatcatccccacatttgctaaacccaaattttaaaaccgaaaggaaaccaacctcttctccacattcttgaaaaccaattaggaaaggaggcaaatcatggagccaatcagaaggagcaggctccagaattctgcttacaaggatgtgcttgtgcaatcacagggaggcctcagcagtccctcctaggagctcagggcccccacagccatcactgggtcctgcccagccccttcatggagttcctctgggaccagggagagggccctagccccatctaaggcagggcactatcccctgcagccggatggctctagggtctgagctggggaggctaacctgggagagctgggctgggggctaccattcagatctgctgacctccagagggagggtctgcggtgcctggtagcagtaggactgaaagggcccctgttgattttctaaaatgagccacagcagcctgacaggtgccaattatggcatctcacggccgggcaggctgggcatgcaccgtgcgcccccgcccaccatcacaggctggcaggagtgggtctgtgactagtgttgatgctgcagccgatgggaggggggcaggcttgggtgcaggtgtgcaagggggaggggagggaagatggtggtagagagtgaaggtgaagaggaaaaagccagactggggaggcaagggaaagaaggaggctaagggtggagagcaaagctcgggggcttcctaggctgataggagagatcataagcagctgaacaccccatacgctccctcactgcccctcaaagcctctgtgaccaccctcagcccaggcttagctcattcattctcccccatgggtccacgtgggctgacccccgctgcccactatgacctgggcatgcccctcccctgtgtttctgcctctaggcatttgaccaagctgtgtcttgtctggggaaagggtgaccgtgcctctccacccagccagatgcgctctccacaccacaggggtacggctctgaagggcctgtggcagacactcttttcatctctttgaaggtggattttgtacagcagaatccaagctgtctgctgtcctcccactgcccttccgcagtgtgccacccatctgcccacccctggcacaccctagaagccctcgggtgctgggtagagccagggcaggcagcctcggagcatggaggccagagtggaagcggccgactgtgaggcgtgcgccactcacgttccgctcagaggagggggaggcgcgggagaagaaagcccccgaaatgtcagcggcagatgaagggcactagaaaatttaatctcccaactttctcaactaatgtgacatttggattctgttctgataagctatcagctggcgaacttcttccttccttttctttcccccacccccaccttctggctggtaatttaaaagtaaatggtctagaaagatatctaactgtacctctggcaaagattaaaaaaacaaaacaacacaacaagcaggggagttggaaaatgtgtgcgtgctgtcatttataccaggcgtttggcctagctgaccctagtctagccaggccccagagtgaaaagctctcttttcgggcaatctctagccccccaacagaagtccaaggggctacgggcaaggagtcaatgatttagagtgaggggttggggccctggatacagttgaggctgctggaggtaggttcagagcatcctagtaggggttgggcaccaggctgtccaaggagcccctcagtgccaacccccagcccaggggctttgtatggtgggcaactgcagtctcctggtttatatttaatgcactgattgctaaaattacagcccgctgctgaggggggtaaggaattagattcagggtctaattaaaggttcgctcttcatttgaatttcagattccagctttaattttagcaacttctctgggagccacggagctcagccaaggggaagcacacctgcttgagcccaccccgctccgtctcgggccctgtgccctcctgcggctctcccaggccagcctggcactgtggatcctgcacagggatcctttccagccttctcacctcctggtgtcattgggtacctctcacttgccccaggaaacccaccaagcccgcaggcctaagagaggaagactgaatcttgggtcctctgaatcagccagcagtctagacactgtgctgctgtgacacctctgtttacagaggggactgttgggtccaactacttttgccttaaagtcaggcagagggtcttgggccttgacaagctcagcaaacaccgtctactccaagtgccctacaccctcagacactcgtcttctctacagccacctcccctgcaaatagtcatacagctttcacacgagtcttctggtgatggggacctcactacctcagagggcagcccgggcggacttgagccagtgagtgacatggaggcagaagggtggtgtggctttgggctctctggtcagtcccagtgccaccacttctgaggtgggtgaccctaggtgagctcagggttagggtctgatgatgggccaggctgtggggtgctcagcacagggaagggagctggcctgacctggaaatgcacctggacgttcctgcatcctgctcacacctgcccacctccaggaagccttcccagctgctccctgtctccctcctctcactgcacttagagaggctctctccatctgggacctaaactgccccgtgcgggaagggccaagcgcctcaccacctgcctcacactgcagtcaagctcagcccactagtgcacagagatgcagccctggaggggtccggacttctagggagttgtgggaggtggaaggtggggcctgtgtcaccacggctctgcagggttgagctcagaatgtgtggcgctgagtcctaacatccattttacagccaaggccaccaaggcccagcaaggaggtgtggctcaggagggggtgctcaccagctcagcgtcagccttggcgtcatagtacacgatgtcttcctcctggtgaggggagagaggcctcagcactagctgctcagggtcccgagacagacaggactcctagccccaaggcctgcatggcacccttagattcctctggggcagagactgtccctttcccccacccagagcccccctcctggaagggccggataggtcagggctgagaatgcagccaggcctatcttcaggggccctgcacaggctccaggagcatgcagtacccctcgactgagaattccctgggccttcctaactcaggggccaagtgtcctgggctgcagccttctaggttctgtctgcagagaggctggctgaggcagcaccagggagtgaggaagacggagaacagagccgagtttgggcaggagggaaataatgactcgacgccgcatcttccaatttcttctattaaaaagcctgctcattacgggcatgtacttattaattatctgtgatttgttgtgaaatgcgagggggtttccacaacaggagtgggagaaaacaaagcccagccctggcgcctgcctcccagccctcacccgcctgcgtctgccccgcctgtccctggcccatgtctgcttgccagtcgcctgggttcttggccatctgtgcgtcataatcaccggccgccccggggacccgtaacacaaacgggctaatttcatgtgtaatgatctttaatcagaaccgagcgcggctgacagaggccgccagaaggtgagcccggtgtcagccaagtgccattggctcaggagggtctgccacactctgcccccatgggcttcagggccacgactcaggacagagctgctgtccaagtcaccctctccaggtgctcctcagccctgttctgtacggcaaaaacctgcagcgtggccccagtggcccctcactcactcagggcttgtttctttgaggtctgcagatgggagtggtgaccaagtctgccacccaggggctggctgtgaagtggcaggcagagccagcactcacaccaccagcgcagatgtcgcccggacacccgcttcccaaggcccagctggggctcactcagtgtgtgaccccagggctagaccactccctctctgagccccaggctcccccaggcaggactctggaaaggggcctggctgtggtgactgcccacgggctccgtcagtacctgggactgtttcagtgaacagtcctagtctgtctctcaccaggggtctaggggctgcaggccactggccaaatgtgcaggcttagtcccagcattctgcaacactgactgcatgcctggcaccacgcatgggtaagaccacaacttcctgaggaatgtaaggccaaaggcagcccgagagttccagcatcccagggcgcctgccgtgtctggcgctttcttacagcagccttatgaccccatcggtcagacgtttcgagagcagggagaagaaagccttcgcaccctggctccaacctgcccttccagcctgttgtcaaccttgcccacacccaccacccacccaccagtgcaagaaggctgcagccccggtgggcctggggcgggggcggaggccgggcccaagctgcagggtgctcggcctttccctgcgcccggctccgaccgaagcgcataatgaaagctgacattacatcaaacacaataaggagtttcagttgacgaagatcattcctgaacacacaaacctattaaactgagggggaaaaaatatcaattcaacacacttgctgtgaaaagaaaatgtgatttgttatctaaaagggggttataaacacagctctgatgctctttccctccgtaatgaaagcgggcgggtgcggtgggaggactgcagattacaacctggggcctcactcacccactttttaggcaaaccttccacaagcatgggaaaggacacaggtgggggctggtcacttgcagccctcaggagccctaggctcccctcacaggctgtggctgggtcctgcctgcacctgggtcaacactaggcacctcagcgttcactggggccacctctccagctgctccaggggctctgcttctctatttgttctgctgtttcacagtcttagtggaacatcagatattggtggcgtcagggacatggggggacatgtcacccaggaggattcttagtcccctgcagatgacagatgaggctcaggattctgtatggtctccctgccccccagggcttgatgcatgtgggaatgaccgctcccggcctctcctgcctctaggagggcgagaccatgccccttccttggtaagaagtacatggatggtggcacacaaggtcatacatgtgaaaatatatcataaatacagctgtgactgctatgcatgatgtggtgtggagctgggggtgtggcgggagggggctgtcagggtcagggtgggagggtccctgagaaggcctctgtctgcttgggccaacacagtacctgaatgtctatcagcagtgaccacctcctgggttgagcaacaaggaggcagtattctctagtgactgagtgcaggacctcagcaaagagtcctggcctcaaattctgacctggacacgtgagctctggaatcctgggcagtgagtgaagactgaggctgagccaaaaaggacccagcctactggcttgtcccagtggcctgctgaggaattccaggggtcacccgcgaggaggcaaggctgcccagttaaatcatgcagcctccatgaggcttcatctctgggtctctacttccccactcgtaatatcaggatgaggaggcctcctctgagggtatgaagagaacagggagctgggcctccccaggggtagggccaactctgcccatgagtggccaccttctgtctttgcaactccacagcccagaggagaggctgagtgtggaagagtcccgggtggagtgaaacgggtgtccttaatgtctggggaccactcccctgacataccctgtgttatctgatattttaggggccattttgcccaactgggtaggagttgggggagtcacccactctgagctcacacacatgccctcccatgtggacttgggcacacagataacaggcgaggggcggggcaggagggtccacgtgacccttgtgttggtgacatacattctccttagcaggagccaagcccaagagaggtgtgaggagggtgggtctcagggaacaagctgaggaaatgagcacggggtgagcgggggaaggacagttgccatccaagttcagtgcttggaaggtggctgccaaggcctggccagacatgactgccgcctgcccaccagctgcctgtgcaggcctaggccagccacccgctgcaccagtgaggacgcttggccttcctgccctggcctagtgccagctcagcctggccaagaggactgttttctgagagagccgtctgtcgctggcttggcagaggcaggcaggggccctatggctgggtcagaccctcaggtcaggaaggccacctgtcctgtccagctggctcttctagcctggcccagccccctcacagccctccctctagtccctaggcagagctccatccactcccaccatcacattccccagggcagggctgtgtccttcccttacacttcccaggggagggctgtctcttccattccactcccagctcatggctttgtttcctgtaggccctggtgttggcactgaggccctggggccaatggccactcccccctccccttcccacgccctggcccagctcatccctggtggtggttttggtggcacacagtgttggcatagtgtggtgctggcaccaagtgtggtccggcaggtggcccctcttcatctatcctaagtgttatgggcaccagggcacctgctgcccacctgtgggggcatgggaggcactgcctgctaatcagggccatcgtttccctggtgtccaagggtctgggttggccagggacgaggaagggggataggagctttacatccaggcattgccctcttgatctcttgtcccagctctgaccctgcagactccaggatccccaaccccccaggctgaggtcagtggagttgtgggcatgtggatgtgggttataccattgataccattgtctgttcctcagaggtttgcatctggacctgctgtgtgctgtcaatacagggagggccacacccggctgatggtgcagtggattccagtctggccacatgggccaagcatctcctctgtggccagaacagctgggcgccatcctccccatctcagaggtaagaagactgctgctggtcacgctgtcactgctgtgggctgtgggggccgatcttagggttggggctagaaaagggagtcctgggcagacatctggagagagaggctttgcactgaaggaggggtggataagggcattcctaggaagagggcctgagtttgaggctagaattgtggcacaggccaggtgcctctcctgagttctgggagggaacatggctccttgtctgtcatctcctgaaggtcattggaaggatgtggtttcaggggtgggtggtgtgcctgcaagggacaaaacagcatcccttcccagcctcaagtccctgcaccctcccctggcatggacagtccctcctgcagccactgctgccagcaatccctggcagcccgagcatagctggctggtgttgggctcttggatacaccattagcattgatgcctttcagcctggcagctgtggtagcagcagtgcttcctgggaagaacagtgacccagcagctgggaaggagggaggtgactacagccccacccaccctacctgggacaccagtgggacaggccggcaggcacccggtgggatgtggcagggaggcagatgaacaaggccgggcccaggtggccctgtggtcagggctgcctgtggtcacacccacagctgggggcacctcaggtcaagccagggggaggggagcagccagagccctttactgcctcatctcaggacagaagtactcagggcccaagggctggtgtggccagatatgcacccatgccatcagcggcttggcacccacatagcctgatgtgtgcagtgattccttcacaccccatagctgagctcacaggcagcactggcaccagtcagtcctttgccaaatggggaaactgaagcccttgcctgggtcccacagggactgtgagcaagtagcactggagtaggagagagggagagaagggtcagtcctgtctcctggggaagggggactggtttggggagtaactagctcattcatttgttcaccttagaaaataatctttcatttccaatctcatgtgaactccctgagggcagcacccagcacctgccaggggtaaaggaagagtgccatggtgtgggcaaggtgaggcagcctcagcatggcctgggggatggggactggggaggaggaacagatttagggcttggagcataggcatgagcccctgacacccgacagccagctgtgaatctctgccaccaacaggtaacctcgggtaggtctatccactctgtgcttctgttttcttgtcaaatagggacaataaccccactgcttcctagagcagatgtgcctggcccagagctggagtgagtcaggtctgccacccccaccctgctcctccctgtgtttagcacaagagtactaggaggcatggcccagacaccccagcagctgtggaggacacaggagccctgccaactagtctggttctcaagggttccatcatccttggcactggggcttccttgaatccaggaggagccctgcctccgtctgatgctggcccgagggccggtatccagccccaggcaaaatcaaacacagcaaggaattggtgagggcaactcaggcctaggctgggatgggtgaggctccccttccctccctcacacactagatcctctgcgctcagcttcttgcacctctgctccaaggagcgagcctgagctccttctgaggtggaaggagaggcttctgtgaccatggcagcccagtcccctgagcccagcctgagggcctccagggtggacaggttgctgttcagggaagtcagggaagggaagtcagggaagggcatttggtccccatttcccagcatctcttgcaggtcactgtattaaagcctctgacaagtcctgaagtccaaaggcctctgacccgggggctctccaagaatctgaacaccttatctggggaacacagggaacactactttcaagcagccttcccactcacgggtgactccacagctcctctggagtgaatgtgggctcatatctcactgtgtgcccagcagtgagaggcgcctggagtaattgctgaatgttggacaccggcttctggctctactccacagacccctctgtgtccctcatgtgtctgggcagctcccaccccccagcattcaaatccacgcatggatgggcatgccctaagtgctgggcagggtgctggggttcctaccttgatgttgtcctgccagcggtgtgctttctggaagttctctgcagcatcagccagtctctgagggacagagcacagggaggtcagaagcggaggaaggcagcctgccctatgcccaccccaaagcctctccatccccagcactccctggggccaggctggactggtgactcccttcccctcatcctacgagaccctcagagattctctgccccagacactccccagcttgctgtgtgggcacctccttgaccacagctgggtccatgcaggaaaggtgaagcctgtgcagtgaccccaggggcatctccatgggactccctgtactaggccaagccctagtgtcactctctacccccgacacacttgtgtcaccccagtgccaagaggaagctcctctggagctaaggctgagctgcaagttacaaagtgcttcaccttgccctgcccttctgacagctatccagagctccacaggaggggcccacagcccaccctgtccatccaggcccatgggccctctcccagacttcctgagccccttcccacagggctcccaagccctctgtccacaagagcctgtcctgttctttggggctggttccagtggcctcttccaacaaagcccctgtgcctgagagcagaatgtccctcagggcatagctgtgtgtctgtccatcccacatctgccactgggcacgctgggtgccagactgtgctgactggtggaggtgtggcaggcctggtcctgcctcttgcagctcacaggcacaacctcgcagaaccaccatggcaggagaggttgagggacaggaagcgcagtgctgtgggggctcgggacctcagggaaggcttgctggagaagacgctggggcccggccaccctctgggcctaagtccgggtcacccagatgttcttatttggtactttctaaggatcccttctctacaggaaaccttggggctcccaaggatggaactgagtctggcctcgggggccttctgcagagctgagagcagtgatgtcctgtcaatcataatgacaaccatcactatcaactggccacctactgcacactgaaccctcccctggccagtgactcatgtgctgtgcaccttgtaccattcacagtgtgcctggcatggagccattgtggccctcctcagatgaggacggccaggcacagagacggccagcagcctgcccaaggtcacatggtgagtccggctcaggctgggccccggagcccagccctcaccaatgcatttgtcttgctcagcccatgaccaagatccaaggaccagcctctgttgggcccaccatgctcagtgaggtgggtggctctggtctctcacccccaccccaccctgtcccacagtggggcaggcacgtcccacctccgggcttacagccctactcagaaggtcccgcctcttggtattcaggacacctcacccccatccttgagtccaggcctgatatggcatgtgggccccagaggggacgtcctactaaagcctgtcagctgcccattaggggaagtggaagtcaggtcatggaggccggcatttcctcctctgaagcatggactagcagggcagggaggaaggtggggcctcctatggagctgtggcctctgctctcctggggcagagtgtcacaaccccatagttagaggggctgtccagggccatctccagccccattgggctggctacccctcctcaggccaagaacactgagtggtgggggaggctatgaggctggggtcccgggagcagggggagaaagtgtctcttggggtcaaaccctctcaccccacagagctgggccctcctggcctctgcttccctctcctttgtaggctcagtcctctgtcccctgccacccttaactgcaaggcctgcttggctgggacccacaccctcctctctccccagcccagcctcacactcctagggttttgggggccccaggcctctctactccgtgatgcctcccatgtcttgcctccaatcctggccctcctgagctcctggacacttccctggagtgaccctcagacccacctgagctcagagtgcccctctgaggcaggccacccaccctggcccctctgcctcctccattccaccccagcatccctcacaccacctcctgtgcacccccagctcaggctctgtcctgcccggaacctgcatcctctcatcctcatcacctattctccacacaacacctggagccttttctccaaatgtagatctggtcatgacaccgtcccctgtcccaaaacccttcagtggttaccacttctctgcatgtaaaaggcacaaccttctccaggtcctgtagggcccacctgactcctcttcttccttttccatcctggagcctcctcttgacctaaaccacaaatgcctgcccacgccgaccccaaacccagggatggatgaggcccccaattcataagcctgcagtgaccttgtgtagagggcattactgtgtgacttgtacggttcgcaatgcttgtcaccagtgttaggcgagcacctgcagtacagcaggtgccgagctcagtaacttggcccggaggctgtgtaaagcctgacgaggcagtgtgtgagtcaagcctttgtcatcactgtgcccctccttccttacctggtgacctactaccttcccagggatgccaaatcttcctcagagtggggctctgttgaggcccctgtccttccccagggttgagactggggcagagtggaggaagcagaggcggtctcttgccgcagaaaagccacagggtcgatggggctgcagacgccacactgacactagtgggagtctccaggctgggccatgaccctgaggaactcctgcccctgcctctactcctggctggggggttccagctccttcaccctcttagggctcagctctgaccctgaaaccttcaggccccaaaacatgggggctacaggcccctctggctccagagcctagcagacagggcaagggagacccagggagggaggccccagctcctagccaccttgagctcatggaatcccatgggctcaaaggctgggtcagcccactgactcgtgaataacggagtcgtaatagccacagcaaaaggattacttttaatcctcagtaacgatcaagccattattattttttcagtgttacagatcaatcagtccatccctgggcactggacgtgtggaaactgttaaacaggcaggcccggtggtgggggaggaagggctaaggcagctggtggggtgcagtggagtgggcaggcttcggccacaaggtcccatcaggcctgaggatgagaggactgggaccaccactggtgtgcatgaggggccctgagcagagatcagagcctggaccttgaagcccccgagtcctggcctgggttcaaagcttgactttcttggagcagggtcttcaccactctggtcctcaacatcctgcctataaactggacatagtaactgcacccactcagggtggctaggctcttggcagcccccttcctccaaccctcagcagctgcacataggcagccagtcccgtgaggtttctctcactggctcttgcccagctctgggccctgctgctatctgctctttctgcctggttagccctatcagactgtgttacctcccctggaaacttccttttgcctttaaccagccctctggacaaggtgggctttactcccctccgccaaggaggacatgtcctgaggcagggatctccaagcttagccccacctacctggcccaggctgagcacccagaccttgggctcctgtccccatagagctgacaatagtcaggcctgctgagggctggcagggagaccgtgcccaccctgccccacccctggaggttcatccctcctagcacttcccttctacctctccctggtcctcttgatggtttggggacaggctggaaggggcaagaaactgaggcccagaggcgagggaagaacctattgggataccacgcagggcagggacagggtgcctgtctctggagtgcctgcctgtcttggggagatgcactccattcctagccctgaccccaagtgcctgtccccctgggagtggttccttgcttgggctctgggctctgctcctggaggtgcctgcagtctctggtcgccctgctaccaggccctgcacatgctgctccctcccaggccactcctgcccagactcctctagccacatccacttcctgaccctgacactcagcgaaccctcttccatgtctgctttccccttgagcactgggtttggtgggtaagtgtcttgtggctgtcaagtttatggtaacctggccctgggcatacagtagatgcacagtgaatgtctgctaaatgaaaactgggtgtctctggacctgtgtagaggcctgggcttgagtctggcctggctctgcccagccagttgtgtgatcctgggtgtgtggtttaacctctcagagtctattttcttcagcacatcctggggggtaagggctgcccatggcgatgcggctatgaagtcactgatggtgccttgcctggcccgtgacgtccccatcatggccagggtattggagggaacctcagtgggactgctgagtggggatgctcacacccaagtccatcatgataacagcaggcatttcagaggcaattatcagagagtttcacttaacaatcaatttccctcagctctgggaaccattcttacaggaaaatgcaagaaagaggaggactcgtcgtgcactgggctggggacaatactcccctgggagcagccctgcacagatacctgcaaatctcactatgttaaacagctttcaattgcagtgggagctgaggcaggcaagaacctgagatcagggacctggggccaggatgggcacccctcagaggccaacacctgggataggaaggccccctgcatgccaggaggggagggccttgggtgatggggggctggggctcttgggtgcccccaccttcttagatggcctgctcctccccacccccaggctaggtgctccacacttctccttggcctcctctcctcaccagccctcacctgggagtccctccctgcccagtgctggtggcccagaagggtctgaggagcaactgcccatcaaacaggactttttctgcacagcccagagggaaaggctggaagagttctttggtcttaattagttatgtttactcccacttcccagaggacatgagaggcttagaagaaaaggctctgaacccatggggtgcaggatgttgagatctagggcactgagggctgagccaggcagaagctgtgatggagcgtgggctctggggtggaggctgggggtagtatgccctgagaatgttgccgagggctgcaaggaaggtagcaatgacaggatatcaccaggtgtggtccagtgcctaccctgggtgagggcttcactgctgcctccccagcaagactcacgagaagtagattctcctgctcccctcctttcacagccgaggggattgaggctcaaagcattagtgtagctgccccagacccctaggtaggaagagggggcatcaaacccaggttcgcctggtggtaaagcccagcagtattggacagtgactgttccaggaaaggaccatccctggccaggtggggcctggctggttggactcaggtccctcctgccaccccttagagtggtccctttgcccttctcctaggagagaggatcagtaactggcctcccagctgtccctccgagttgcccccacaagccttggtatcactggatccaggccacgggaggggacaagtaccaggatgcccagcagcccctgcctagcccagcactggccccattgccacccgtcttccctcccaacttgtgggtcctgcattagctgtgtattgtgcacagatagatactaaatacagatttccaatttccagagctgttatggtctaatgagtaaataatatacatatttaaaactgtctaaaaacatatctgcataattaaaatatctgcataataatgaagcaagatgcagctctgccaggggggagctggagccccagggctgacagtaggggcagaagtgcaggtggggttagggggccctggccctgtgggcctctgctgctgctgcttcggccttgagcagacatttgtctgtccatccacctcctgctccaagcaggtgcgtccacagtcagggaccaaaagaatcccctcagccctgtcctggcaccactcgtggtctgagggaggctttgtgtggacagacagtgcctgctacatgcatgacggccacctcagcgactttgtggccctcacatgatgtgctcagagctttatggacacagtctcactcactacaaccttctgagggcatgtcttgccccgaccccacattttgctgggttctgagggatgaagagaaatgcagcaggatgggcagtgagggccgagcagggtccgtgacttacgtgctgagggtgatggagacacgccagtggctgtgctttcctgtcgggtgcactgttgacatgcatgcctcctgggacaggacgggcacccagccttacccgtccctcaaggccccttccttcgccccttggcgcatctacgctggacacacttggctcctgtctcatctttattttttccttaacaaatttgttatagtttttattaactaattattataagacaaggtctctctatgttgcccaggctggtcttgaactcttgacctcaagtgatcctcctgcctcggcctcccaaagtgctgggattacaggcgtgagccaccgcgcctggcccatggcacatcgtaaggttcaaacctactctttttgtattaaccatgtttacaccttaaagataaaatgaccaccagagtaacaaaaaacactgaaaccccagaccacaattccagcaaacagaagcctgcaaggaaaataaacatttctggcacagagggtgcctcaggggaaggctggcatgggaggccatcaccgctgttggcagcaacaggctccctgaccttttccctcacaggactcatgcgtcttctgcaaattgataaaaaaaattagtaaaatggattttttttttaatttaaaaaaggtcagaatccatgtaacagggaaaaactcattcgagttgtggtctccctctgcagcagggcagccgccactccacccaagtccaggcttgacacctccctgtgggtgtcacaggcttggtaatcagtgcctgcaccccctcagtccagcctggaaggggcaggctgtgcttcaatttcctaggaaaaatatgaagaaatgaggggtggcctgtgatggagaagcagagggaatgactgtgaccagccagggtggggagcctggtatcccagatgctggaatttcaggtcagacagaatttcccagaacatcctgggctcccaaggatccttgctatgttgtattttgccaagagaggacacttaaaaaaactcccactctctcttattactgttatgttaccaaaaagtgaacgttttatttttattttcagttttgttttttttgagatggagtcttgctctgttgcccaggctggagtgcagtggtgcgatctgagctcaatgcaacctctgcctcctgggttcaggcgattctcctgcctcagcctcccgagtagctacaggcgcccaccaccacgcttggataatttttgtatttttagtttcaccatgtggcaacagggtttcaccatgttgcccaggctggtcttgaactcctgacctcaagtcatccgcctgccttggcctcccaaagtgctgggattacagttgtgagccactgcatccggccaaagtggacgttttaacatcaagaggaggaaggccatgagctctgggatcccttcccaaggaagtaaaggaagtggcactcacaggtggtaacaagtattccactggctttcattgcttttttgctttaaactggaaccacaatcaatacagaaagaggtcgggtgtgtcctgggacaggagccaaatgtgtccagtgtgaacagggagagggtgaggcaaggggcctctgtggctgggctgagcatttgcagaaaccagcttgaatttacagaccagttttctggaaatgggagtgaaacccaccctctagagatttttactctgcagcagcaggctgactcaggaggacgtgtgggtggacctggacaaccacgtgctgcaggaaaggtctggtctcagggctgcaggtctctgccttacccagtcccctgctgagctcccaggtctcctgttgagcacttgcaagagatgccccaatgagaaataaaccaatacatgcaacaaactgcttcaggtccacatttgaactgtggcttcagagcccagccatatgaaggcacctcaccctcaaggaacccagagctgaaggctactccaggctgctggggctctttccaagatattgccctgctcagccccatcccacaggggctcaaacgggtgggaatccaccaacctagctggcaccccagcatgaaacttacccatttctgcaggtcagtcagtccctggcaacccaggtggaatttatcagaattctgccagttttgtgtcagtttccctccccctaaattatgatccataattcatcaacatttctctcatccttagaaaaaaccatgcagatagcattgggtgagggtacccatccaggggccgtcggccactctggctaggggagcagggacacatccttatctgagtgctctgtggggcatggtgctgcctcctgtcccctcatcagtccccattctagagatatgtgtgggcacgggggtggtcgttgagtgtgacagtgccctcctcccttgtccagccacagaggccaaggtacccaagttcctagggcttggcaattgacccagcacataatttggggagcactgccctcacctctctgtaccttgatctctcatctataacagggagggaccaaaacactgccagggcccctcccagggctgtgaggatgtggatggagagcagggcatagacagcgaacgggatggggactcactttggaaactggagacacaactccaggttctgggttgctccttcccttacctcactccaggggcctcctgactggttccccctcccccaaactcagcttctctctagggccttctaaacttggcctgacctgttttcttcttcagtttatgccaacgggctgcccttctcctcagcaccaacttcgctggagatcttgttcattacccccctgcagccctgcttggcttccagccctactcccatgaccccttccttgccttcctgaccagacctctcccaagccctgcaacccaccttcagactcccaaccaaagctggttatcatgaactcatctgccccagcccccacaccttcaggtttccccatcaagttctgtgacctgtctgtgtttcccggatgcctggaccactcctcccttcctaacattatcctttaccaggctctgccaacctcatctctcttctaccacactgacattgaagtttgccttcctgccatgctgcggttccaaagccttgtttgtgctgtatcccaagcctggagtgtcctttctcatcccctcccctggctagctcctcctcatcctgtaggagccactgctcttctgcctcctccaggaatcctggtgccctgtagggctgggttcccacaattgccctggggtttccatcactgcatgtgcctgattccctcccagatgtggtcccttgaaggcagggacttgattcatggatctgtgtggccccagtgctgggcaagccagctcagtgaggaaatgctaagtgacctcaggctcccatcacagtcaaggggtcagggggtggatcaggagttgcccttggggatctgctggtttggaggccctgggtttcattgggatagagatggcagaaacccggtcagaaatggtactgatgacagagaatagggatccaagatggtgtggggggtgaaggtgtgagtggggtgaggctgaatctaagtacaggcctcactgtgttctccacgaagaggcatgcgaggggcagcctctggggtctgaactgctgaagtctgctctccaggaccacaactccactctggaccttgtgaaaatgttacccattagccccacccagctgctgccaggtcagtaataacatggttattagcagaagtccccggggctctgctggaatgagaggcagagggtggtggacaggagtgcctcatctggccaggtcagccaggagctgagtccccagggagctcagcacccctgccctggtgccagatcagtgcattctcctgacatgccccaacatcctcctccaagaagccttctcagatgcctctatgcccaccatggctcaggggcaggacatgggagggtgacagttcccatgggaagaggttgatatgactctccttccttcctgtcaacacatgtttactgagcacctactgtgtgcagtaaactggcctgaggaggtcagtgagcattacagacatagccctgctcttacgtggggtgccagcagtaagttcttctttatagtccacctaacttcttcccactgcaattcagtcccactgccctgagcagagaacttgctagaggcctctacaggaagagctgcctggaatggcaccgtcactggaagaatttagggtgctaggaagctcccctgcatgggaatgtattcccacctgaaagctgagagtgagaccccaccccagctagaacaagagagcctgagtcccagcccaacctccaggctcccttcccatgatgttatttttatactttttcctaaaacacagcctaagcgggcccttctcagctctattaacattaggaatctaatcagtaatcagacagctcataattttctgattagctttgattaggcccaacctcaggagaaggagtgggacagtgaagagggaggtggggacaaaagggccctgaaatgtgcccgatggggcactggttgggctgggggtggagggtagtggagaagaacctctagccccattgttgcctgttttggggaagggacgtggaatggagtcgtgggttgcactgggtcaaacaggttgcagggtcagagagcaagggccgtggtggggaggggggtgggggcgagcccagcccacctaggcagcaggaacaccagagcaagcagcttgggcgaagactttcagcaccatggacagaggtagggaggagcgtcagggctgggtttgggcaaccacctgggtgttatcttgcccaggccccctcattcctcggtggcactcaaggaatgatcccaggcataaccttgagtaatggtgacagtgacagaaacggtaggtctgctcagtgggctgaaatatgtgaccttggacctggagaactggccctgggcactcttactaaacacaccacaggcagggcctgccttgacaatcatcccttcaaggtgaagacaacaaggtcaggggcccactggcccccccatacaaagggggaactgaggcctggagggactgtcaggccactgtaccattagggacagagcttggacctgtactgaggcatcccaggccagggccagatctctctcctgtttaaggcctgtttgtagcttttgcatcacatgctcagatggaaccatggtgctagccaaaccagacttcctaggcctgccactcatgcactctgacccctgctctgaccctgttcctggcgatcatgagaactctccaatctctaccccctatccattgcccttccccacagattcagacttcttgtagccacatcctggagccctattcaggtcagagtcagagtggctctgcccctgccccctggtctgggatcacaggtcattgccctttgtcagatgcagccatccaggtgaccgctaatgaaatacacgaacccattggagaagacatgcacagctaatgccatgcaaattggcacagaggcaatcagcctgactctaaaagctgccccactggccgcaggctggctcattgtcttttctgtcaatttgcatctcattacccagaaggctgtgctcactggaggttaaaagaaaaaaagcaccaagcaagccccactgtgtcctgcctccagcaagggcaaagcccacgagtgggacagggctgcctggaggactgcccctcagaggtacactccacagggagccccccatcagccctatcacccccatcacccaccatcaatattatccctgcaccaccagaatgctactccattcaccatcatccccatcatcactgttgttccccccacttaaccagcaccaatgtccccatgttcactgccaacatcctccccatcaccattgccaatattactccatcatcatcagtgttactcccatcaccatcagctccaccatcactaccttcatccccatcaccatagtcatcacttccatcatcaccatcttcatctaccaccatcaactctactgccaacatcacttccatcaccacctttaccatcactgtcaccactacgaccatcaccccactgtggtcacctctgctagtgctcatgtctcctggtaatcaccactaccactgtgctcactgctacctgcaccatcacctctgtatccctgagaagagtctgatgaagagacagagacaactcattcttcacctttctctgtccatcaccctccagcatcatcagagggttggggaacctgtaaacaaatgactcagtgaccagagagctcataatcaacctggatattggtgcttgtatctaggtaccttgacctaggtgcttgatctaggtatctgtgaccttggacatggagaactggccctgggcactcttactaaacacaccacaggcagggtctgccttgatgatcatcccttcaaggtgaagacaacgaggtcaggggcccactggcccccctatacaaagggggagctgaggcctggaaggactgtcaggccactgtaccattagggacagagcctggacctgtactgaggcatcacaggtcagggccagatctctctcctgtttaaggcctgtttgtggcttttgcatcacatgctcagatggaaccatggtgctggccaaattagacttcctaggcctgccactcgtgggctctgacccctgctctgaccctgttcctggcgatcatgagggcttcaggaggaaagccctcaaggccagggggtggaatgggtgcttgtccactctaccagggcccctgaagagactggggcttagcttactctcctggttctagtaggacctgggactgggcagacagtgaccagcagccacagtaccccatggggcagagccaggagctgcatgtgtaatgcacagaactgataccattctctgaatcctgataacctcctccctaacacggggcttctactagtcccagcctcataagactgtgaggatgaaggcagacatgagaggagaacagtgagcatccaaggctgtctcaaagggcacataaaccctatgggagaggagtatggttaggctaagccaggtgggctttgggaaagggagcaccaggcaaaacttgaagggcaaggtcagatgaaggggataagggaagtaatgcccagagggcaaagatgtgggggtaggaaggagggcagtggaggccaggggagctgatttaggccttcgattctcctgggcctccctggactcagggattggtgcggtaggtgtttgtgcttatgaacatggcccagcctcttccacaggacctcatttcattatctgcaccttgcttcacacacatgcttccaaaaagccccaagaagcccaatcattattcccattcccccgacgaggtcaccaaggctcagagagggtgactcacccacccaagaccacacaatgatcaaatggcagagctcaaactgaatccagctttgtccatgccagggatgggctctgacaactccctgtgtccctgggcagcaaggcgggatatgaacctaggccaagacaaagccagggctccctgcacaggtcatccagaagagtgggagcaggagccagactcttccagctaggctgtcactctgctggatgtggacgcctgaggctccaccttgtcgctgcccaccagctttgggacacaaagccaagcactggttggcccggggatgatgctgagggcccaggcagaggtgacaggcagacaaagggctggaggtggtgggcagggagggcacagcctggctgccaggtggaaatgcccagggtaagagctgctctgaatactggctgcatcctgctgctgcaatcagcctcgacacttggttattacgaggagtaaaggcggccagtgggacagctggagccgtggtgacaacatttaaggcgtttgtcagagccgtgggacacggactgccaggcgctaatggcttctgcttgctgctgccaagtgagaggagggtgggcaggcggaggcggccttgctcctgcctgggcccaggcctaccccacactgcacagccactccacgacaggtagggcccacctgggcctcacagatgcctagcaacggccacagagccatggcaccaactggagagggcaggacagcagtcgtgtacatgtgcctgcaatatttggggcatcgttgccgcctctcccttcattcaggctgcagtctctctcccctgggacaagggtctgttatccactacaccatctcccaggaaagggacccctgaatcccagctggcttagcccccgacctcctcagcccattgggctggactttctgagggagagacccttctagtgatggatccacactggattcagatctaccctgagtgattttggttttcctggcctcagtttttctccccgcaaaatgggaaaatgacaccatccacccaggcagactggccacattaatgataaaacagaggaacgctgaagtgctggccacatggaggccgacagcacttgggctcatgaggaagggctggaggtagagtcagacaacaccctggaagtggagtgtggaccctgggggctgcctgaaggtgggggcagcctggaggaggcagcagagcaagctgcagggaaggttcaggggttttccagggagaaaagccccatggctggttgaccaagtagggctttgaacaaaaagtgctcctgaaatatatgggttggcaaggaattcctgcacctgcagagcccctgtaggacccagcaccagcaccgcctgtgctgcacacggagctgtcatcgtgggcgatgccactgagcacttgctgtggccagcatcgctcattaatccctacagcagcccctgcaaagcaggtctcatttctacaccattttgcagatgaggaaactgagttcagaggtggttcctcagcttatctgtggccacggctctctgagggcagggtggaaggttgaacctgggctgtgtcatcaagtccccctcccctacttgccgattagcccaggagacaccctgagccctctctgaggaggaagtgggcctctggctggctgtggatcagacagcgtggagtgggagacactgtgtggctggggatggacccagcgggcacgaggagacctgagagggtccaagctctgcctcagattccctccacgatctcagggcacttgtcttcccatgtggccttggagttcttgctactttcccagagcatagactgaggccagaggaggcaggaggggtccttgaagaaggcagggagttgtatacactccccaaggccacccagcgagctctggcccccaagaaccctcttctacctgtggttagcctgctgccaggctcaggtcaagcccacatggcatcagtgctggggacactgctgggggtcagtgttgagcccagtgaccctttgggggcggctgtgcttggccctgcctagatcaaagactgttgtctggaaaaagggcagggcagaaactctgggacaggaccatcccctcagaaggctgggcagaccccagggccactcttgcatagaaaggctgacagaagttctgttgtgagccatcctcactcattctcacaggtgaagaaaccgaggctctgcagaagggggatcccctagtgtgagcaggaggcagtgaggctaagcacagagcatgctcactaccttggggttggtgtcccttccccgaacccacagagctgggtgctccctgggatgggggggggggtgttgtctttgtgccccagagtcagcccagcctcaacccacacaaggtatgcaaggcctctgggccacctgattcccagcccactgctctgcctggcccaggcctgccagcccactcctgggttgagctcttttcagcactccagagtcctatgttgctctcctgcccacaaggccactccgctgcaggactcctccaagggaaagggggtaagtgggacccctgtgaccaggcctcttgggtgtccacggagggagctgttccaaacaaggtgatgtcagaggtctgtggctttagtgggagtgggtgaggaggtttcttccatctgactttgaggtcaacagctttgaaatcctgggggtggagggcctggagttagagaaggaggatgtgtgtgtgtgtacataaacacatgtgcacatgtgcagacatgggaaagcacatccatgctgccaacatgtgctcaggcacacgtgcatatggtgtctgggtccttgcttttggttcaccaacaactttaacatccagaactcccctcctgaggcacaggcagggaagggctgttcctgttggggctgtgtgtggggtggctcactgggctgtggctccaggacctataggctccaccacctgcccactcatgcctggccaaatggagcttcttggctatgacctgtctggccctcacccaggggaccgctcctcaaatgtgccctcaatttgttcattgcttcacctccctcccagccctcacaccagcctgtgatcattttgttttgtgttatctcaaccaacactacagtgtggaataaaaggaaagggcctcagtctccagggcttttcttctttctgctaccatgtccgtggtctgcacttggtgctagagacataggatgagtcagatctggccccaccagagtggaggggaggggcttccgcttgtctccatgctcactctcccccagctccattccagacacagtgcagccaataccaggctagaccaaggaaatcttgtgcgccagctcccaaccgactgtccaccagatgcttttgtgattctagttttcacttatgggtacctgttgtccatatgtgactgtcacaatcataggggcacaaggctggtgctacttaatccatttttcagaaggaggaagctcaaaacaatgtagtgagtgctccaagtccacaaacctggcagaaggagaagctggagcccacacctaagtctgttcagctgctgagcccaggccttccaagctgcagcctgagatggtcacacctgtgtgaccaggactcccagcactgccagcagcctctgcctgtggcccctgggaaagaacgaatggggctctgaggcttggggaggagcaacatgcccagggtcacactacagtccaggtgccagctcccagaccctgctcctagcaaaggtgcatgggctgaggggcaccatcctggaaatccccccacaacccccaaacaccttcccatggcaagccacgctgggcttctcctctggttagaacacaaaacactgggtaggtctcccttgacttccaggaggctcagggtgagcccatgggctcagctagagcaagtgcctagtctgcaggctgctcacctcggcctctgccccgtcattgttactcatattctgcaattttactggatgtgcttttgagaagagctaattaatactttgccaaatgagttggggaatcaaccaaattaagctatctctgcccacaacccccacatctgggcagggtgggttgccctgtgaggctaggctggctgtgggccctgctctgagccaccaccccaatggtgggcaggccagcatctggcaggcgcagccgtctccctggaaaacgagacatttcttattgagataacgaatcgctccatttagatccaaattaacctcccccaattaccccattttctaccacatttcaccagatcgaaatccccttctgcctgcacagtcacgtgctgagcccctccttgctcccaggtctcgtgcatcccaaagccatgggcactcaacagccctaggcggccagcaggcgccttccctcattggccatgtttttcttttcttttttttgcagggggtggggagggagaggataggggtgggggaggcttgatgcagctgctgctctgaggagtgggaatttctattttatttttttagctcgttctttgaaataaggatgcaatatgggatcaatttttgatgacagtgaagtaaaaggggaaaacagtagcaattttcttttctgaacatgccctatttaatggaaggatgtcaccgtggagttttatctggaggggagagggcctggttgtcagggactcatggtcagagatgtctggcaccatctcagcctgggggggtgctgggcaccccctccctggtctcccggtgccctctattagggtgactgccagggcccaggacttgggacagggagaggccgagtctccatcttccctcacctggcacgagggtggaccctccccaccttgtgctctgctggtctcaggctgcatgaggagtctagagctagggccccaggggatcagtgtgaattagggttataaaatcccacccagctgctgctgccgctgccacctctgtgttaaacctaggaagcggagctggttggggtaggggggtggtggtggagcatgaggagggggaagggagaggcctgaatcctgagctggccaggactgggggcagtcagggtatctggtgccttgtctcagggctcaggaaggagagatgggggtaagaatagggcagaagtgagggtgttcctcagtgggggtggttttcagagaatactgcagggggaactgttgcctcttctaccaactctctccaacccctgaccctcagccctgggtcagagaccattaactggaattgggccatggctgtgtggagtcaggaggcctctggaccaagcactgcgggactcttgaggcctctgctgggagggtgggatgcttccccgttgtaagttgccccaagtgaggttgaggtccctaggctggctgagcatggtggctcacccctgtaatcccagcactttgggaggctgaggtgggtggatcacttgaggccaggagttcgagaccagactggccaacatggcgaaaccccaactctactaaaaatacataaattagccgggtgtggtgacgcacgcctgtaatcccagttacttgggaggatgaggcaggagagtcacttgactttgggaggcagaggttgcagtgagccgagaccgtgccactgcattctaacttgggtgacagattgagactccgtctcaaaaaataaataaataaaaggctcctcagctgcatgaagcagaagccagggtttcggttgccagggccccatttcccccatgaaacccacccccctagtcagtttgccatgcagcccccttgaaacctgggacatccctaaagtagctgagccagtcttggcccattccttctgatgtctagtgccctctggccatctgtcttccaaagcctcctttaccttgcagtgcagggacagaaatgagttagatagaaccatacctctgaggcccatgcagcacagctacagacatctcattcacagatgcatgcagtcacgccaggcagctctggacccgcaaaaacagcacacagtcatgcccaacccccacaggcccacacagagcccaaggttagagagccaccgagccacatacccgcaccgtgcaagcgtggccaagcccaggtatggtccttacagtgaacagctctgccttcacacagggagaaaaccactggggtctctgcagtcttctcatccacaacctgtggactctctaaacaaacaagcaatttaagaccccaaaaataccttccagagtcctcaacatgaggtcaaagcagggctggcaagagcagaccctgctgcctcctctagggtaaaccatgaaacagaaaccaagggacagggcagccccccttccaaaacaatagcagatcctgggagggcagtggaagggtggcaggctgggtgtctcatcccagtgcctgcctagccctgttgacagatgccgcccaaagctgcacccactactgcccttccttcttcggctgtggccaggcctctgaaataattagcaattctgctctacaaaacgctggcccgatgggataataaactccaacatctgtcagaagagcgagctcctatgaaattgccaagagaaacatttttctcctcattcaattcacatttaaatcgaaaacaacccctccaagtctgcgccaggccggcggcgcagggctccgggagcccacaagctgttcctgggcctgcaaagaggctcaggcgcacagtgatcactcactcaaattaacaaatcattttatttagaaatgaagagaatttgtaagtgacgcatggcttcagaggcactgaggaggagggaaagccagccatgggcccgtctttcctcccctcagcagaaaggcctcccggagaacgcgggtcatgggggccaacactctccatctccacagccacccagtgtgataggcaggctaggaatcctgttgacattctgtggtgggacactgacggccaatgaaatgcccaaggcccccagtggctcctgctagactgagggcacaggctccgatgtgagggagcccagccagggctggctctgccagagaagcagtgtcctgggtctgcaattccacttttgggctacagaaggtgctgtgcagagagagctgagccccgtgtgggtccagggttgggtttgactatggatgagctttgtcaatacaattatactctggaaacaggagtcctggagacttgagttccaggcctagggctgcagattcaccatctgtgcaatgaaggacacagacctggactgctaacggtcctgtcacctatgagagccgctgaagatcggatatcaaaggctgacaaatgaaaaaaaagttgctgataagccctggtcctgcccagacccctccttggggttaccatgggctcctgaggtgtctgtgtgtccccatcaggtcctctgttccaggttcccacagtgcctgtgtgcccctcaccaaggaactcactgctctgtcctgcaatttcctaacaggctgtgcactctctgaggcaggaacaatgctgtttgtttttccccattccagagggtgcccagcacttggtaactatttggtgaataaacaggtgaatgaatcaatgaatgaatgggaggaccctggctgcacagacactccagtgcatgagaaaggaatgatgaatgtctactatgctatattctcacacctccgtgcttttgcacacaccatctcctttgcccagaatgttgtgggcatccgcctcctctggacggacaattaatggttttcaacttcttactgccgtgctcacttgccctctgctctgggcctcttcctgcttagcttctgccctgcagcctgtcaacagctgtggttacagtggtgcaggcatcagctgatttacagaggtggccactctgcaccagattttcttgaggtcatgttggggactgattcttccttgtccctccttcggccagggctgagcccatttggggcttggagaatggcccatctctgagagcttcccagttgggaatgtcaggagctgctgaaacaaacacagaaacacccctggagggtagagggaattttggaggggcaagacagaagacaggaccagaaggatgcagcgtgaggggagagattcccaggaagaaaggaggagggtgagatagagctaggagtgatggggctagcagcagaggcccggctgagacctctatttctcctataggccacctttaggtggtacacaaggcccagagaaatgtttctccttcccaaactgttatggttgtgagctcagagctccacggcggggtgacccctgatttggcactccccactctgggctccagggtgcccccctgaggggagggcagacaggaatggtggggggctctgaaaacccctgctctgtcctgggccccaggggctgtgcagaggaatgtggagatcacagcacatgcagtggggccacgttagacctagctgggaagccagaagacctgggtcccggctggagccgcggagccacagtgtggtctcgggcaagtctcttttcctttctgagcctgttttccagtctgtaaaatagagatcttcatcttggacctgcccacctctaggtgcagaggtgaggcaagtggagaaagggatatcacagctgtgatagggctgcacaccaggagtgaaagtgtgtgtgtgtgcccatcgggtgcacacagatacacgtgggcatgatgggctgagatgcacatgtgcacatgtatcccattcacgtgtgtgtgcatgtccactgcaggttccacatggggacatgggctctacgtgtgctcctgtggttgcagacaggggaagaacagggagaaatgtgtgcccatgggttttatacatgcacttgtgggtgcctgaagcatgcccacatgagagcctgtgagatgagactgttggtgcagcaggaactttgaggtggtggagctctcccttctcctcccaccccatctcctcagactcttctggtgtagacacatgtctcactcacacacccccatacatgcaggctctgccattgtggccctggcccacaccttagccatacatacaggcacacatatctacccagcaccatgcctgatatccacacagggcacatcccaaccacatgacaacccccatgagctgacagacaccctgcttgtttctggcctaggcaggccctgcaacccttgcttgtgaactctaaagggcacttggggggtctcttttgctgacatcagcagctgctcagggtggcctggggctggtaacccaggatggtccagcgccgtctgctgtgcctacactgcacctttccccacctgctccctcacagggctgggcagcggggaggaccccacagatcctcaggaagctggatcaccggtgggtaggtggggcgcaggcccagagccaggaggaaggcatgcctcctcctcctcctcctcactgtcttcatgcctgtgcaggctccaggtttgcacctgtggatgtggggagggcaccagcaccctctccttgcccccctgctgcttgtcctctggcacctatgacagcccattatgcattctcacattactcatctactttgcttcctgcctggcccacaaggtccctgagggcaggaccaggccgacctgtcgctgtgcagtccccagcaactagtgcaggatctggcacacagtagacacttagtgtgtacgtggggaatgaatggatgggtggagcctggcaggatggggttcagggagcaccaacatgtgctacagtgggaggaagagccacacatccctgcctgtatcaggtttggaaattaatgggccccgcgaaggggccagatgggaggtggtggcagtgctgtgagaggcaggactgtacttgtgctcctattggcccaaagagaccgcaccctgccctgtgagggatcataggctccttctctgtgatcacccccacctcgccatctgcagagccgcagaagagggcactgcctggggctggaccagggaaggacacacagtaggtgctcaacatgtgtctgtaaaatgaacaagtaacacccctgccttactcaaagggcttccagagtgtccaatgccagggttgaaatccctgtgtggtgttcaaagttcccactgctctttctaccttcttggccctccactgccccgaactccaaccaggcccctgtgcaagccccttcctgcctttgcttgtgctatgcccctacgtggcctgcccttccctcttcctggctaattctaatttcacccattcccaaatcttgccacaggcccactcaactccttggggatgtctccctgagcactcccagggccggtcagggtgtcctcagggtctgtgaagcagggcatgtgcaggaagcctcaggaggggaatgcagggcagcttggggggccagtgtgcagggatctttgttctagctccacagggccatggccgcctcttctctgcggcatcctggtgctccccatgatgcccagctgtgtccactggctgctgcagggtggagagggagaatgaggtggagggatggaggaatgcaggggtggggcccctcagaggcatgggccttgagggggttcccctgtttctccctcacagctggggcatggctgggattttgagtccctgagcctttgcgggtatggaggggagcctggcctctgggggagggagatatgcaaccatggggagcagcgtctcagtgtgggagttgggggatgatcctggatgagtctgtgtgctctgggctgtatctggaagccctaagatggagttgctcagcctgcagaggagtgggggaggtgagaggaacatggggagctggtgactcaatccctatttcctgggccagggagagattatgggagggggagtctcagctgaagttctctagaggcggagccacggaaagaggcttaggcttttgcaagaggcatcatggtatcatacaaggaagaacttccatttagtgggctccctctctaaaacagggacctgaggacatggtggcatctcccttcagagttagggatgggctaacggatcactgcctcggaaagggggatgggccagcccttctccagccccataattagagatgttgttctggctgcctgaggtcaaggacctgggtctctagcatacctggggtcctgaccacatgagccaggacctgacaccatggttggagctctgagtcgggaattctacaagggaaacattggtgaccccgttggtgaccttgaggcccatgacaccaaacctgggctgcttctcacttgatgaataaccctgtgggcccttcccatcctatgaccattgggctcgggagtgaacctgaagctaccagagttaaaagcaccctcatgggaaagtcggggccccttctacttgaggaaatcccggcctgtttaatgggcacatgctgtagccttaagtgagtatgcaggatgtggcggaagcacacacagagccctcaggagctggtgccgtttcccatatctggcagcgacacctagggttggaaccctcagacgcctccctgcacatctatggctgtaccgctctgaacgtgcactatctcttctgatctcaaaagctaagcagggtcaggcctggttagtactggaatgggagaccacatgggaaaactgggtgctgtaggctttaggggaaaaaagaaaagaaatgcctcccctggcatgatgggaagccacagagggtgccacaggggagagggtggccagcagttccctggggccaggccctgcttccccaggtcccccgcggagacgcggaaggcctggcctctgctccttgcctgccgtctctcttccctccacctctccttctaagaggaaaatcacagtgaagtgaaccttgtggggagaaaggagaagatttttaattaaaagttaaagagaattcacgtcctgacatcccgagggagtcgcagtaagagaaggaggggagctgatggggcagcaagggggagagcagaaaagtaggccatgccagctgaaggctccatgcatggtcctcccagctgcccctgcccggctggggtccatcaatgtggcaggctctgagctgcacggggccctctgtgcagatggggcctcagcagcctctggttttccatgtggggagtggtgggggctcagcagtggtgctgtggctagggtagcaccaaatactgacttgaaaacagcttaaactgctgtgctgctccctctgcctggtggcctggctggagttgtgatgcttggtcagggccaaggcttgggccacatatgacccactgcggggctgtatacataccctgtgcatagtccacagcccctggcagccccttcctgagagatgaaccaaaccttggtcagggtggagagtgggagggtgtgggggctccaggcagcccaccagctatgggaagttgtctgacaggtaggtggacggacagatgatggcgacgatcactggggttcctgtcagctgtgtttgctgcatgcctggcaactggcacagcccatccatgtgtggctatatgtgctgagtagaggcaatgctggcgtcctggccccctcaccccttcctccttgcccccagcctgcctgtcacacacatgccctcatgtgccaggctgtgagtgggaaaggccacttagtatctcattagtcttagcccagcctgggcctgggcagttcccaggtgtgaatagggtacatgggcactcctggggcagggctcagtcaggcctgtgccatcccttcccctgggttctgggaggtctctgacaccctcaggccctgctcactgacctccattggctctccaggctctggagctgagctggggcatgtgttgaggggccctgtgtgctggggagggggccagagctcacctgtgaggtggccccacatccagaaatctttcttcatcccattccctccttaccctttcctgggaaaagaaaaacgtggagggggaactatgacagacatcatattttgcaaagtgagctaattacagggcagtcacgcagggagatgggattagcagaagaatatttgataaaagggagcccaggtatgcaaatgggtggcagggaaaggtcagggtcaccctgaggagattgtggggactggtgcttctggtgcaactggtgcagttgcccccctcacccaggccacagtcacaaggctggggtgtcactgctgtccatagatgaagcacagatgggtccattttctctctttaaatgtttactactaacctgctgggcctggggacagggtcttcccaactctctcacctgactcgtggtggggatgcatcagcccagggcactcctcccaccccatggtgccctgctccccaactcttcagcccttggtactacagggacacaggaagatgatctgggactctgaagcccatcattctaaaaactatcccccagcagggccacgaggcctccagcacctggagccaagggtccaaggtgcaaactcagaaaagcttcaagcccctcagaactctggccaggaacatgatgctacacttgcaccaggaccccaggatgtgagtgagtccaggggaaaggccatgccctctgaccccaagtgactgggaactgctcactgatgcaccccaccagttcactggctgcctcctggggaggtgtcggcagacatctgaggaaggaatacgagaggcaggcaggaggcactgcctgcttcctgaccatccacgttggttcctgggggttctgccttctcaccctgcagtctgctcccgccagagatcccctgacccaaaggcactgcttctaccctccatcctctttagcaccaggagctgtcacggaccatccctccctggctgcctcaccttatcctgagtcaaccccgacatccctgcagccctagctctggcttcaggcctctgacccctcccctgacaactacaaaggcctccaccctgaccaccccacttcctgtggactggagtctaactgcccaccccagttcagaacttggaacctggctccccacacagtggaagctggaggccgccctggattctgccagatcttccactccactcccccaggttgccacaggctgttccctttgtcagaatgctcctccctgctctgaggtgcaaactccctccttccctctagcctcagcctcaatgccccttccctgtgcttccaggtaactaggacactttttcacagaatctcaaagtggagtcaagtgacagggatcttccctgccaagccccctcctggagcaaaggatccaagatgcaagctcagaaaaatgtgagaccccttctttcaatagcgatagccacacggcacaggcgatctgcatgctgaccacacttcccctcagaagaccccactggcagtcctaccaggtggactcttactgcccatctacagatggggaaactggggagaaaaaggaaatcactggcaaaggccacaaggctgatgggtcagtgctgtagctgcaatctcgcctggcgcttctccctcttcatccagttgcctgatccatgctgccctggaagccgagtcaccctcacagactcatttctggaaaacctacttatgaagtgggtggggggtcttatttcagaagtaaacaggatttagttggcccagctctgctacgcggccaacagacctggtccctaagtggtggagcagcgttggctgaagtgaaagaacccaggttccccccagacccagggtaagctgcttcccctttctggtcccctgttcccccatctgtctctgacagctgcccctcagtgccagtcaccaaccaaagctgctcatttctgccctccccagggctgtggctccctgacccctggcctatgcctacgcagctcatggatggatctcagcttgcctggttcctggtctcctcaagccccatcccggcagtcccatcccctgccctgaccctgcctcactggctatctgtctgttcttctgtccatttgcttgaccacctaaggctcctctcctcggaggctgccagacctgatgactggggacacaggggaggagagagcagcaagggctgctcagagggatcttgaatagaaggctgggaagccccacactgaatcttcaaagacttcatggctgctgtgccaggtagagactgcctgccctgctgaccttttctaagtcccaccccattgcctagggctgcccctgctggtttcagatgcctgcccagcctgcacttggcagtcctgtgggatgaatatgtgaatcaagaatggagagctgcccacttgtccaccaaccctgtccagggaggggctggaccctaggcatctgggaggctgaaggatggggcgtcttgccctagctgatctccgtaactgggctccagctggtgttgacacagcaaacatgctgcaactcccatttgtcaaggcacagagtgggcaaacacaggaggctgcaacaaagggcccgacaaccgtgcccagcctctcaaacaagggcccccaggcctgtgccaggaggcaggaagcttcgagcagctggatactttggccctcagagatgggaggtggggacagggcccttgacaaggcccccaaagaggggaaggctggcaggaggccctgcagcccaggattgttctacacacggggcggagctaaaggaggacagatccatctgtctgcggggcctgccccacgcaatacccccagaagcatccctccctggactggtgtcaccaaagcctgggcataaactctgatgacagatctgtgcggccatacctgttccaactgtactggtagggaaactgaggctcacagagtgtgaggtttgccaagggctcagtgctgctcaagtgtgagtgggggatgcagcacagggtgtgtgagggctttgcttcttggctaccttctatgctctggttctggtcatgggcaccccgtgccatgctgcacctgcctaagagggacccttggccacaggttcttttttggggcagtgcaaggtctggactgtgtgggatgtggtccctggatggggtctcggctagaccccagggagccccgtgtaccccagggagactggcctcacactgcatctgcacatgtgctctgtggagcctgccagtgggcaagaccctctgccactgcatgcatgcaccccaacacacacgcacgcgctctccacctcaggaccttgggccttcttgctcccttattctcccttgcctagctaaatcctccctcctcccaggtcccctaggcctggtcaagtatccccatgggcttgccccatggctccaccctttgtggtatgcatcactgccatcttcagcagactgcactcctcaagggaggggcctagcaggtctattcgtgctgtccccgtacctggtaacctactacgatgccagcacacagcaagggccagtgctcagtaaacagaagctgaagcaacggaacctgaggcacccagtatcccaggacaggaggagccagggtcaaggtggagtctcttccaggaaaacctcaggtgcccctgcccgggtcaccatggcacctggagccagtgaaacctcaggggttagcttggggaagacagctgagggtctaggagggtcccgagggccttcttgccaccctatccccctacctgggtctgtggcactggccttccccagcagcacccctgtaagccaaggtacctcccacaggtacccactgccacagagaggcatcgctcgctatgtattttaaggcacagaaagtggggccagagaagtgactggccgctcccagggccatgcttccacagggccaagcttgtggatatgcagctaccaccccagaactcaggcgtagaaccctgtgccctgcctctgtcacccccacacaccctctcccctgcagtggaaactgatgcccaggccaaaccttccaggttcccctcccagcccccagtactcccatctcagcagattcagcctgagtcagttctgctcactctcactgctaagccagtgcccaggctgggaactctactaagatgccttccttcttcctttcttctatctttggaaattccacctgccttccaaggctcagctcaaatgctacctcctccaggctgtcttcttagacttgcctgtcccatgttagctgctctgcacattgggaccccacagcctgttccccatctccttgaagtctgggcccgagggcagggatcatcctggccaccggctcgcccttcctcacatgcacctaccctcccccagcctcgcacaccaggatttcagaacgaagggccagacactattaaaactcaattaaaattcttacttctctgatcctaaattaggctggtttgtccctgtggcacctgcaggccctttccctccacctctttgcatctgctcccttcgccacctgggacccccggagaagtgggcaccatcaggggatcctccctctacgcaggccttctctggggagtggagacacatacatctccctccctggggttcattttctccattcaacggactctcatctccctgtcctggattcctctcctctggtggtgaggtgcaagggtattaaaaaggaaactcggggcaacagctcccagcctgcacttggagccttctctgagtgggactggccatcctctccagctgctccccagcaacccccagtcgaggtcctgcctctaggcccttgctcatgctctgccctccacccggctttctcaccttcccttcctcccctggccttcccctttgccccagtcagcaccactctacttcctcccaatccctgggagctctgggagggcaggtacacaggctcaggagccagggtaagcaaggggaactgtgacgttgcctcacccaggcagtgaccagggttgacatctagtctccgactctgttttctcatctgtaaaacgggcattctgccccacagcaagtagagactggaatcacacaaggcctagggccaggctggggcagcagaggtttgctgaatgactgagtgagcaagtgaaagccagggaggctgcatggcactcccaggggaggcacctggcatcaaaagcaaggccgtagggtgggacaggctcttgcagtgagagctgggcctggggcagctcagccaaggtgtccccacaggaggtggggtgacaccagtcaggacacccaaggtgttgagcttccaggcccgacacatgcctgcagtcaatcccttcctctgaacttcagccactagggagaattcggtggctgggtacaggtggtggggctgacccatcaggctctgtgggcctcaggagtgttgcacaccagccccctagacccttattttgactagtaggtgctagtcaggaatgatcacagcgcttctgacccctcctgaggtccctgcatcttggaggaggtcccaggagaagggcctgctccacggagcagtttcaggggccagagaagcttagccccaaatccacaagtcaacctttcccaaggcctggcaggctgggccaggcccttgtctgaccaccactagctcaggcgggtggctgaagacaagagaatgactatttctcttgaggacccttggccatgtcccagccatgtcccacctgcactgtctcccttgaccttcccagggagaccagctcccagctggaggccttcaaggggtctcaggattctcgactgccagacagagatgcaggcaggggaggccgtccccacactcatgtccagctgttgggggtagcgtctttgcccaaggctcacgctgaccccagggacacttgggtttaccgtcccttccgcagacatccaggccacctcgtccaaggagccctctctgactcccattccttggtggtcgctctgccaccgcatgctccctggtttctcctagcgttcaccaccaagtcccttccttatctccttgccagccagctctttggctgcctccctctgtaggcggagggccccaagggtgcccacacaatgggtgtccaacagattcccaatccccaatgcttcccccatccctggggacccccagctggctcctgtgggcggcaacttgccaggaagcagcggcactgtttgggtgaggggagaataatcagctgtaaacgccgcaatcagggagaaaaggctgcttgggcgcttggcgcccacgcgtgcgcctaattggctccacgtgtctgcggctcctttccagagcaggagagtggaagggtcaagatctcttaatgttcataatggaggggaggcagaagccatcgccagccccacataaacaccttttaattgcccagagaagggtgggaggaggcagccaatgccacaggatttcctgcctgtccatctaccattactgcaccttttagagcttccctagtgtggagtcagatcccagaggctgagccccagccacaacccagagccacagcgctggcaactgttctacaaatgttcaccagtttgcagaactcgtgttctgttccaggccaggccttggcagtaggcgacatccatggcctggtcctccaggggccaacctgtttgtctcaccctcgtcagtgaatgcacccgtggactcagctgaactggcctccagctgcctcagtgccaaactttccccaacatcttgctgcctcctccaggcagccttcctgtgacctctttggactgaagggatctttctcctgctggcccttctgcctgcacctctccgaggcccccagtatctccctgctgtggctctcatggctgcatctctgtcccgttaggccagtggttctcaactggggcaactttgcccccaggcaacatttggcggtatttagaaatatttttggtcatgacaactgggagagtggtgtactgctggcatctagtgggtagagggcaagggtgctgctgaacatcccacagtgcacaaggcagccccaccgcaaagcaggatgcagctcaagatgtcagcagtgccgaggctgacgccctgctttagataaggctttagaaaggaggtgggagctgggtaggatggtctccttcctgacaaagggagcggtctgctgccccacagtccctgactccctccctggctcacacctcctgcccctctgaatgcccagcccagagcccagttcctgaacagacccggtcacactgccaacaatgcatcactttaattgggttaagtggccattagcagcaaaagcagggcggctgtgtgcagaagggtttttaattttactctttaaatgatgctcattccccagagaggccaccaatggtgggaacaatgcccactggagcccctagaaccaaggccagaactgcatgccgccccctcccatccatctgagcctcatgggggtgtgggaggggtgctcagtgtcttgtcttcactgcccaaggaagaaactgagggggcagggacttgcccaaggtcactaggtcatcagagagcaagcccctgtcagaggaaaccagtgtcccatctcctattcccttgaccctgtcccactctggacagcaaacaccacatggccactaatggtagcacagaggagggcagtggctggggagccatttgtggggtctggagcccaactatctggatttaaaccctggttttggccaggtgccgtggctcacacctgtaatcctagcactttgggaggccgaggcgcgcaggttgcctgagcccaggagttcgagaccagcctgcgcaacatagcgaaaccccagctctactaaaacacaaaaaaatagccaggcatggtgacacacacctgtaatcccggctacctgggaggctgaggcatgagaattgcttgaacttcggaggcagaggttgcagtgagctgaaatcccaccactgcgctccagcctgggtgacagagcaagactctgtctcctaaataaataaaccctggttttgctgtgagacctggagcaagtggcttaagctctctgaagctcagtttcctcaaaacgtaaaatagagagaggagagtaacccagcgacctgtgtgaggattcagagcaatacagagcatgcaggcttatttcaggtccggcacttggtgggcactcagaggccagtaatcctgggaagtaaagatttcgaccattttctgggaaaaatcctgaactctggccgggcgcggtggctcacgccagtaatcccagcactttgggaggccgagacgggcggatcacgaggtcaggagatcgagaccatcctaacatggtgaaaccccatctctactaaaaatacaaaaaaaaaaaaaaaaaaaaaaaaaaaattagccaggcgtggtggcaggcacctgtagtcccagctactcgggaggctgaggcggaacaatggcgtgaacccgggaggcggagcttacagtaagccgagatcatgccactgcactccaggctgggcgacagagtgagactccgtctcgaaaaaaaaaaaaaatccctgaactctgaatctacacagaatcatctgtggcacgttaaaacatcctgatgccccgcccctccacccctgctgaccccccgagaatctgatgcgcttgatctgaagcagaagctgggtgccataattttagaagctccttagacaattccaatgtgcaaccagggttcagaaatgctgcactaaggcaaaggtctgacccttaggacaatgggagggacctgaggggcacaggcatgttaggaggggtgctgggcttaagcctggggctggtgtctccaggtgctagattcctagcggggcctcccaccacctctggtttgtttgaggaaggaggcaaaagggcctcccggaaagcaggtttctagccaccatgttgatgtccttctggaacctgctctggccttgctgtcctagccctgggcttccctttctctaggaaccaagcccgctgagcctcgatacccctggctgtgtctctgagaggaggctggaatctctcccactggggtcacccctcacctaatcctgggcagtaccttcccttcccccatggcctctcctctgagccacacagcacaggatggtgctgcaggggcacaaccttcaagagattgttcacactgtggtctttacaagttgacgcccctggagttgtgaaaccagaagtgctgggcagggagggtgctcatgtccttatttcatagggggagaaactaaggcctgggacagcactggactgagagttccacaagggcagaaaccgggcctgtccttcatcactgcacccccagccctgaacagggcatggtaaacagtagccattggcggatgttggtgaacagatggaggaggaatgtaatgatgagggggtggtcttcctgagagccaggctgtagactaggacccagctgggagggcaggagagtcctgatttgggtccaagtctgctataagaacttaggcacctccctattcctcccaggactcaagactctgagagagtgggccttagttcagaggcccccatctccctaggtagtcaaagttccaagacaggtacccctccatgtctctgaagctgagggcccggcctgtttcccagacttggggatgctggttgcttgcattgcaaggcccctgatctggcctgctccctcctgactcttggccccagcaaccaccctttgcagcttggagaaactcgttacaaacatctgattgtccctgattagatgagacaatgaacttccgtcctgtgttgctcagctccctctttgcaagcccccaattagaattccagcccagagcaaaggatttaaattggattactggatggggtccagggagagaggaacaatgtagtggggggtgggggtccagtcccccaacagccctccctccatatacactcagactgcaaacaaatgtgaaaaaggagaaagggaccaggacttgattaaaagcacatttaaaacataattaaaaccaaagctcatcttcaacaattaggaccaagcagggggaagggtgatcctccccctcctctggggatatgggcagaagcatctcgtgtgtctacagccaggggtgctgcagcaggaggagttcactgcccaggagcgctgggaggccatgagctatgggctcagtgcacgcctcaggaataatgtgggggagtcaaggggctggctcagagtcagggagacctgagttcaaatcttggctctgccatatcctggcctgatgcatggcacctctgagtcccagtgtccccctctgtgaagccaaggtagccagggcttccttctccgggttgctgtgagaatgatgcatgatagactcagcacacggtgagtatctgtctggtcagtacatgcctttccccatcatttctcataaaaaataatttctgggccagatgcggtggctcaggcctgtaatcccagcactttgggaggccaaggtgggtggattacctgaggtcaggagtttgagaccagcctagccaacatagtgaaatgctgtctctactaaaaatacataaattagctgggcatggtggtgggcgcctgtaatcccagctacttgggaggctaaaccacaagaatcacttgaactcaggagatggaggttgcactgagccaatactgcaccactatactccagcctgggtgacagagtgtctgtctcaaaaaaaaaaaaaaaaaaaacaaagaaagaaaagaaaataatttctgtttagtgccgactgtcccaggccatggctgggctgcaggtgcagtggaagggagagacatctgtctccctcacatagcagagtccagcaaggggggtgcagggagagggttgggaccaggacctcaggcctttggctgctcctcccaagctatcggagttgattgttcctttaggggtgggggaagtggcttggaaagagaccccagccctgtgattcccaaggggctgggcaggaggctgggccctgggctccacgcatggagggtgggtcaggcgtcttgtctctgccaccactcagcacccctgctgtgccggcctggctgagtggcaggccgaaaggcctgagggctgtcccttcccgcatttatcagacagttccaacacaagttcagggctgggtgcccacatttgtaaactggacagggggcagcaaagctaggaagtagtgtgcaaatgaggggtctggaaggaagtggggtggagacagggtcggagaacaagggaaaggcaggagaagggcatccaggcacgcccagttcagaaaggtgagaaggtggggcgcgatgcactggctgagagaggcgagcgtaatgggctgctatccctgcagaaggcgtggctctgcctgctccccgctgtctcccacactcatgtccaggagatcctgaagggtgggtggagccctgctctgggtcctctgggtgggaggtcctcagagtccaccttctctgggaagctggccccaagaagcagtctccacctatttcatggccccaggtcacatagggacaggcaggggatcccatgggggacagcagggcccagctcctggagaaggaaattctggttctctcttggggactggatatggcagggtgtaggctggggtggccaccctgacttaacccagccaggaccctggcctgagcctgggcacagcctgtgtagacttgctcatttaaaaaaactgctttattgagatacaatttatacaccagcaaatccacccaaataaagtatacaattcagtggtttttagtatattcagagttgtgcaaccatcaccacaatctaattttggaatattttcatcactccgaaaaagaaaccctgtacccattagcaggccttccctatcccttcccttcccaggcacccatgcatctactttccatttctatggatttgcctattctggacatttcatagaaatgggatcacacaatatgtggtcttttgtaactgacttctttcacttagcataatgtttttgggttcatccatgttgtagcaagcaagcatcaggagactttattccgttttttttgttgtttgttttttttttaaagagatgaggtttttactctattgcccaggctggagtgcagtggcatgatcatggcccactgcagcctcgaatttgaaatcctgggctcaagcctcagcctcctgagtagctgagactacaggtgtgcatcaccatgcccagctttgctcctttttattggattagtttgtctttgacacaggctggagcaactgcagttatgcctctgatctggggggagcttggatgcctctcactcatttacgtatgaccttccctggtcacttggcagctgagaagccccatcccacctactctccctgggatgggctgagtgtcaggggtctgcctgctttgtcatggcagcccagcgcattcctgttacccctcagaactatagtggtctgaggctgacaggcacaacctctctgaatatagaggcccagatgggggagcagagaaacattcaaagccatgggcagagcagcccccatccttacgtggccttctctgtggggcttgcagagccccctcgacactccctccaagagagcctgcagcctacctcaggggcaaactccaccagcagcaggtcactatcctggccaggtgcccatccagggcaccacccataaacaaacctggggacccagagggatgggaaaaccccaggcccggaaggagggaggggtagggcctgccccagtcccagcctcaggatcacacagagccccaagactccaagtcaccacctctcatgcagctactccagatagtatcatcctgttcctgccgcagctgcccacattccacgtgggcacagccctgctgatgttggcccagctgaactcaggagggccacgtgatgaaggctcaggacactgccctcatggtacaggacctctccacctggccctccctcagtgccgcccccctgcccccaaaacacacacctaccttcagggcctgcaccttcctgtccagaaggctctcaatgtcccctgccaccttctccaccaacttctgaggctcattctcctgtacctcgaacaggttccggttgtccttgtaaatctggaaggaagcagaagccaggggtgagaccaggtggtcccacgtcctcatgccatgggccctgcatacccctctgcacagctcacctcagcacagtattcacccgcacccagaccctgtctttggcctctgagagagggcatggaaggccagcgcccccacagacttgaaggcagggcaaggccaggggctccgtagcttgcatctgggatgagggcccagtttaggctggtcattgtggttggtgggatggggttgtcactgccttctctgggcctcagggccccccatttcagggtcatgagcagccctgcccccgactagctcaaggtaactgtgaatagcagaggggaagagtgggctggagaggaggcaggaggttgaggcgagatggagtcaataagcacacaccacataccccatcccaaaaagaagatgctcacgcccatgcatgggcacacacacagccatgcctccacgctgctcaggcatctggacccttttttgtgggtgctgccccagggcacttgcaggaactagcaggagctctgggcaatcccacgggctcctctgtcattcagggcacagaatatggggaatgggcaccagggaggaaggggcaggttggggagaatgaatctgcccagccttcctccaaggggggtgggtctgtgggcaggtgcatgtggcagtgtaaatctgagggtgtgtgtgtgtgtgtgtgtgagggctcaacatatccgtttgtgtgcacgtgcctgcgtgttggggctggggtggggtgagggtctctaaccccccaggggcttgtgagtcttaggagcagatttctgcaagtgtctttgttcacagctgggtcttgggtgtgtgcgtgtgcgtgtgcgtgtgtgtgtgcatttgtatgcatcacatactgctgcatgtgtctccaagcctgactgggtccatgtgttcattcaggtgacccaaggaggtctgtgccccaagtacaggctccttcaccaccagaggtcacagaataggctgccacgactgagccgtgccaccaggctgagcagaagtggagggatgtggagagacagagaggaggtgatgaggggagataaggaggggggagaggcagccgatgaaagacagacaagcagagagagataaggtcggtagagtgacagcgagaaggcagggagataagaccctgtcatctgacagggggatggggtgggggggttgggtgctgctggagcccctgctctgctgctacccagtgcctggcagtccaggggttaaagcaccacacaaagccagctcaggcaatcttctcctcctcccgccacccccatccctcccggcttctcttttctttttgtccttcttttagaacaaaataatttgtggtgaagtcgctccttcccgcagagtagtggcaataagggggcgagacttgaggcctggccacatggccagggagaagagaggccccgagtgagtgccaggccaggatgttccctgggcccctgggccctgcctcaggacagacgttcacagagggagacagtgttagagacacagggtgaggaggggtcagaccctgaggatcactgaggaaaggcagggaacctagagcctagcaccttactattggggaaactgaggcacagaaacaggagagggaaggtcaaggccaggcgattgagtggcaaagccagatcccccatcagctttcacccatccttgacagatcattctggggtgtgtggccatggtctcagccacatccaccgatgcctctggagagtggtgccccgacccatttgcaccagcagggggcactgctgcccggcttctcctggcctgggatgaagttcatacctcagactctgtcaaggtcattaccaggtgcagccacagtctgggctgtccatggctgtgtacagccccaggacctgaggcaggaccatgtggttctcctgggaaagtccaggagtccctcctcttgggctccagggtgccccttgcagcctggcatggtaactgtgctggggatcagggggctgcagagtgagtgggtctctaggtggcaggcccacacctcagggcaccaacaggtgacatgaggccttggaagctgagactctgccaaaagtcactcatctctgaacctccgtgactgatctattaaatgagagaacagtagtacccacctcacaggctggggacagcaaacccatgccttgagcagcctgtgctgttgttacggctattagtttgggatcaccagaattctgcagatggaatcatagtccctccctgcccccactctctccctgctagatctgtacacttggggctgtccaaagccatcggctccattcctgagctggtagcctcagtttcctggggtctgcccacctccagccccaccctgttctcccagatcggtctgggcagtctcccacactgagccaccctgtccttgtctccgacaccttagcctcagccccagaggtgataatggtggagcctagacactgggacgccactgatagggcacagccatggccagcttccttctctctctcccaagcaccatgtctgtgtgcagtggacacctggcaaatgcatatgctggattctatgtccaaaagcagagctctggggccagctgggcccaggtctgattcctcaacttctgcctgcggctgcatgagccctcggggcccagggatgcatccaccgtgttttcttcctgttctatttctactcgaggacccaccacagcatctttctgccgaccctggtctgggtcccatcaagcccactgacctgtcatgtgcctgcaggcctctgggtctccagcccaggccagttcccacagctatactttgactcacgctgtccctgcatcccctccaccttgccctgctatctaaatcctctctagggcaaggccagggaaatgggctggaaggggtttctgctgagaggagagcagaatcccagaagtgcaggggctggtcatgctgccagccaagcctgctccccaatcccaaatgagcccttgaggtgcaacagtcctcgaatgatagcccctagtgccacagccctccccctcaacattcccctgaacttgctccaattgttcctgtcttctagggtgggccctgagctgagccccaaatccccaggagatctaagtgacacagcccagcagatggtcccatcctgggagaaaggtcatctctacattgatgtggtccagggaggtgctttccacctgcaggcccagcaggagcccaggagagcccagggcaactccagtgcacagactctgcccaagactagccccactccagccccagcctctagccctggctcctagggccagctgggaagtgcagaaaggccagggtgcaccggatgcagagcctcaaccaccacagcaggatggcaatgcccactgatgtccttggcccagagagttaattagaaaaagccaactgctcccacagcagcacagccggcacagccccacctctgctggactaaggagcacgacggggcccagctgatcccagggtgccccagctctgtgccagcagtgatagggagggagaggcagcagctttaacccacagagagtgccaggatgctggtgggacagggtagcagactggagccaggtggggatgtgggggaggactgaggaacagggagaacaggggtggctgaggtcccaagggacaattcaggagtctgtttggagccccttgttcccaggaattcctggttcccccccttgtttcatgtactggtgaccatggctcagctggtgccctcctcccttgagggcactcctatcccaccagtgatggagacctgcccctccacctctcccctcccccagggctggctctagcttcaaccctctctcagctctagcagttcttcagttaggcatcagggcaagtccggccagccctccatcctagggcttcacagggccgtgggggctgatgcctccttagaagccccgaaccctctgcccagcctcctgcttcccccatggctccgtgtaagtgggaggcgagcctggaggacccttgcaggaatggtgaccttggacaggaagcctgcatgctggcaggagcaaagggagccagcctcgttcccacagctcctaacagagctgcctgggagagaggagtccaactaccagccccaacgtgcctggaacatagagacagccaccacaggaaactaaaggcctcaggacaagtgacctgggcaggccccaatcagaaggcattttagaaagtcagcagcaagggagcccagacctgagctaccagcaaacctgcctagggcaagggggaagatggaaggggagaggaaaaggagagaggagaggggaaaggagagtggggaaaagcaaggaggaagggccaaggaagctgcaggaacagccctgtttgccccgagtgttagctctggctgctctggggcaggtggtttacatagatgacatcactgatctcctacaacccctgaggagggtccattctgatcatctccatgtggcagagaggacactgaaggccagagaggttaaggcgcatgcaaaactgcggtttgaactgggtcgaatccaaagcccttgctttaggtcatactctttgtacagttctgtaccccacctttatccctaaacttgaaggcaaagccatgggaaaagaggcatagggatgaactgggcaggcctgaagggcttggggcggatgcaggcagaggctgaaagactgaggcccctggaaggtgggagggccatgctggaggggaatgaggggaagactggcagggccagcccaatcgactaagcacccacccaaccctgggagtcaaaacaggcactcgcacgcaaggctcctctccgcagcgaaggtgaacagccctaatctctggaaaattaaatcagaaagaaaatggaacaagaaagatttgacgcaggcttggccctgctgccagctgtctcctcaaagacccagctcaccttggggttttgccaggtgctccagcacccctggcctgagccccgaggcatgactccggggagactggcgctccaatcccctcaccacatttcaccacagggagcagccaggtgaaagtcttaactgtccattaggcccctgcagggagggcagccagtggatgagagactgtgggcgaggcctcctgaggcccaacccaaataaacaagccctggggagggaaccacctcaagaggccacagggtctgcagttggaggccggggtcagctgccagactgggctacactcatgtcagggatgttgggtgggtggctagggggcttgtggtggctcaggaagcctgagctgggccaatgaggtagggcgattggcgacaggtagtgaccagttcaaggaccctagccagtcagggtagagccaggtccgggccccctgcctcacccaccccttctaggctgctaacctggccttctgcctcagtgagaaaatagagggtattgacataactgcaaatccaccttgaagactggagagttgatggggtaaccaggcacctggggaccctctaccactgacagcacttgggacagatccaggacaggctgcacccctcagggctctccctatagcctagttcttgatgggactgaggggctgccccatgatgggtgcacaaaaaccctaatctggctgctctggggacacaccagccacgagactgggtgtgtgactggcagctccccaggagggggctaaggcctgtccctcaccagcctggcacagggcttacagtagggcaaggggcccctggagccctcagggcacactatcggtgcccaggcaggggggctgcgtgccactcagttacatgcttcatcagctgctgacatttttgccaactgccatgttaggttcctaagtggccatgccacactgccaccatcccaggcggggtggccccatggtcactcagctgtatatggtgtcctgtcacacacaggttttgtacactgtgatgttagttgtcccattaataattccccttcatatccagtacagaatgcctgggatgaacgctctctttagagggcatcacagacacagaaccaggccattacaatcagcctgcacgggctacagtggaggtcacacagcagtgtgggagcagagaggagggtgcctggcctggtctcctgggtgggcggcccattaatagcactatcctcccccacccccacctccttacatccccctggaacagcagagatggaacagacctcgtccctgccctcctgggactctctatccagaggggacagatgcccagacaggtggcagtagacagagctgtgcaggagacacttgggagtggggctggcctgctccagggtggtagggggcaagaaaaagcctggggagggctttccaggggagaggacatctgagcagtctgaaaggctgggcaggggtttttgtgggtggacagggacgagggacgcttggcagcagtagcgccaggtgcaaaggctgggagaagcggggataagggactgctcagtggctgcagaggggcttgttgggggacagaagctggggagacagggtgtgagggcaaggggagcagatacccaggtggtggggacagggggatcctccaggaaggagggacatgtgactgaccacaaggtgagaaaggcctggcggctctgtggtccctcgtcctcaagaggcaacttctaggagctttcaccagcaagattaccttcacaaaactcacaggggcctgaagcccccaccaccacccccagcaacgcctccctgtttttaaagttaaagtttagttgactgtcatccattaccgcaattagtacattatgtctaattatgcaattagtgtaaaaagtgcacttgctgctgagaatgggaaattacgctgcctcgttacgctgtaaaatccatgtcataaaaaggctcaatctcttgtttttcaaaagacacaaaacccaacacaaaacaataaaccaaatcctcccagccaagcaagggccagtctgtgccaacctccctgtgcttgcccctgtgcagagcctgcctgtgaggcctgccctaaatgtgcccccaggcaaggcaccacccaccagagacactgggcatggcccattcctgggtgtagccctttgctcctctgaaacatacgcgaatttccaaactgacttgaaaactgtggcaatcctgattatccatttacaccaggcctgacttgaggcctccagtgttaaggcctgtatctcaggggagaacagtcctagaaggaaatggtatccacccagctccaaaatgagaggtcctttctccaaggttcctgatggcttctgtgaacagggttgcagaatccagctcggaagtgggaggaactttcccacactcaggactcccaaagcctgaaagcaacacctggataagtagtgagccccccaccacagggactattccagcccagctgtcaggaatgctgagaagggactcacccatcattagcaagcaccgtggctggattccaggctgccatcgttagataacagcattcctatggccgtgtgcctatgtgaagcttgcagtctgtgactttatctcccctaaattctggctcccttggtggtcacgaggatgctttggggacaggtttggagtgagaaagaatcaaatgaggtctccctactacagaagtgacaatcccaaatggccctgggcaagggggctggagagggggcacactccagtgtccccgcctgcctatgccagcatgaggcacactcctgtgtacctcaaaacaaatgctgcaggaccaaagccatccacgatgtatctccaaggtcacaagttaatgctctagcgtaggctgctgagtgcctgcccaagaagcactttccccaagcagcttccctgagcccctgcctctgagctcccaccactccttgatctaagatgcttgacccaggccttggggtgggtggtgcaataccacggagacaccttcacagacaagaatctgccctggcctcctggggatgatgcacgacctcatgtaggtgccactgctgagtggcactcagacaaggtattcacagaattcacagagcagagaatctgaggcatggagacccacatatcccagggcccatggggcactggctccctgcaacctcacccacctgcaattgtcatccattggttctgggtgtgctgagatactggagcactgaccacaccccagagagaagcaactactgagaaagcagctggggtagagggaggagggcatggaccccactggaggggcatctgttgcctgaactcaagacaagcgtccctggacagttccagcctccaggcctttgtctactcagatgggctggagagcaggggagacaattctggcacagcacagccacatggacaccagccatggagactctcagggcccccatcctctcaatgtggcctggaatagcatcgggtggggaatttgagcctgaggtgaaccaaaccgcaggcaagaaccaggggcccctgtttgctccccctccctgagttgggagccgccggctgtcgaggcagctgggagggaagctgtgcccagcataccagctggcacgggggagtgcgagtaaacatacccgcactttcccaactcacagaagtcgccgggtgcggccggctggtgtgggcgcccatgtttatgggaagcagattgtttgtgtcggcgtctgggcccccttgccacccaccctggctctgctctctcccgctgcctccccatccagttggccctgccttcctttcatcagaactcctcagcctcttgactgcagaaggatggggatagtgatgacaggtcctctgtgtggccagacagggctcagcgcataacccatggagtccttgtcatttgatagctctgggaaatagagaaactggctgcagactaccaggcagtgagtggaggtgcctgtggcactgggcttctcagaccccagccatcagttccaggcccccgctgccgctcagttctctggcccgcagactagcccggcctgcccttcagtccgttcaccaccttgtgcagccctggcccagcttggccttggacaaggaccctacccccgcagcaggacaaacggccccctctgccctacaacagcccaagtagacagacccagagttgggccgctgccttgccatctggcctcttcaaccccttcaccctcgtgcccccatcttcggatgtgtaaaatgggttaaagtaaagccccctttacccacctctcaggactcagggacagtgggctgggagtgaagggctctgggagccagggtgggcagaggctccagtggacccttggtgggccaggggggactcccaatcatgtcacagctccagtgggtttcaacgggtcatggagctctcatgtgagatgaaacagtcattgtggcccagagtccttatagcccagagctggcagaaattcacccccataagtaccctcatgagacggaattgaggccaggaagaaaagggcaaaatctgctttctctgtatcacctccatccacccctcacaaccctgataggtcaggtgagcaaccttcttcaggggctgggcaggtcccccaaggactccagagtggctagaaactgaccttgccccaaagccaccagtcaggccctgggggtggagatgactgtaacaagggcaccctggaggtggtcagcagctggctggcttttcatcttacagatgaggatactgaggcgccgggagggtcagaatctgtccaaagaggagacttcccagtctcttgcacccacagccaagaatggccaaaagccatgggtctgaattcctgctctgcccttaagcagccttgtggtttggctcgagccttcaccctcacagtctgcacagccctgagctacctcagccaggccatcctggcattccttaaagatggaagttcaagtgtggggtgctggtggcttttcatgggaccgccttccagggttgctcccaaggccctgagcaccttccctgatccattctgtcctgcagggaccaactttcccggcctcacaggctggaattctgtcctgtgctgctgagacttgctaaagatgtcaccacataaagacagcaccaacgacagccccaatcacagtaagaggtgctgctgaggccctcaggctggctgctcttgtgaaaacatgagatcttagcatggcaggtgtgggagataagggtagagagatgaaggtaagcccagaagatgagcccatgtcctctcatggtatcaggggcctcttttggggcaaggtgatcccagggacctgccctgtaccagtgcacagatgcagcagcaggcacatgcacttgaccttgcataccaggtcacacacactgacctcaccacattcacacctaggactcaggaagccccttgcagatcttgctcaagtctcacacttaggctcacagaaaaggtaccatagcctagatgggcctgtccactgtcactggatatatggcagccccaggcctgcgtgaggctctgtgggtgtccattcacacctcaaaaagtggtgtgtggccatctgagatgttttaagcagtggaactttgctggcttggacggttggggctacctgaaggtcatgaccctaaatcctgctgaacacaccattggaagggctcctaacagcataggtgccggacctggatggggcaagggcatggcctgacccacagtggactctgaaccagggtcccaggagagcccagctaggctcccccttctgagttcttgatgcagctgaccacaaggcaccggtaaggcagtaggcaccagagtcactgtgaatgtgcaagcaagtgtgcaaggggacacaccatgcctgggccatctcatttacctcctctgtcagcacctcctgatgccatcttactccctcctctaagttttcctttttctcctacttccaatttttaggctctccttgaattttatgtatccttgtaagtgcccttaagtcttctgtagaacaagtcggaagcataaataaataaacaaacaggaccaagacactaaggctgtgtatagactgaagatatgctgaggacaggtgcacattagggacatgcatgctctgaaaacacatgcactctggggacacagacccaagggaactcagcttctcccatcatttacagcctatcctgggctctcacaagaaagctcccattttggacctgaaaaatgcaggggtggggttaccacccaaagctttcctagagctggggtcagtgatctctgaacccagtccatagaggtgctcctgagcaggctctggcccttctgtacctcagttcccccttatttcacttttggggaagagggacaatccatggcacctccagctccaggttctctctcggtgtatgcaaaactccagcagcaacaggggccagcatttaccttcccgcatccgtgcacagtgtttgccatgcaaacaaactgtgcaaacaggactgatggcccggccacactggcaaacaccatgagggcccttagcctgaacagccatgaacttctaagttaagtgtgctatgctcaggggaggcacatgctgtgcctgggccctgactccaggtgtgccacctccttgttgccaggtttgggggctgtggggttgggtgacaattattacgggattagctgccattactggcggggccaaagtgagcctccacaccggccatccatttcatcaaattctcaccagccccagttgtccttattttacagatgtccttattttacagatgaggcaactgaggcacagagagtaactggcagagctggaattcaatgactacatggacttaccacatgcatgaacacagaccctgtttcggactctgcctccatctccccagcagctgtctccagcctgtgggatcctgtaactcctcttcaggcccaaccctgcccctgacccctcctttgggaagccactctgactgcccccttggccatgtccattgggccacctgcaccagggctatgaaagtcagcggggtcagctgagtctcgggttcacaaaccccatcctgttttgaacatccatcaagagctttttctcagacagttgggtgaaccctcccaggaagccagtcccttcaggataacaagcccctaattcatttgcctggtgctgtctaccagaccccgagggctcattcgcccaacctgtgcccagagggattgcagggggagggagagccaaggacagttctgagctggcccagagggtaggtagacttcaaggaggtgcttcgacttgtaggaaaccatcttcgtttgtaaggttggaagtctaggaccctaggctacaggtgcataaactgaggcccaagtcagcagggtaagcagcagcaaagagccaggatgacccaggctccagcttctcaccttcttccgtgctaggaaggtcagagaagacattccagggaaaggtgtagctggatgggccaaaacagattgtgtaccttcccggcagaggagcagcatgcaaaggtgaagaagaaggaaggctggtgaggagagcttccgggggaggggatccactagcaggcaggggcagctctgaacccgaccctcaccgggaactcactgcctgtgtgaattctgagaaactgtaaggtcgtctggaggctacaggctggaggcctggatccccacatgcagtgtgaccttgtctcccccaccgcccccttctcgtggtcaggtgcccatggggtcttggaggcgatggtgccctgggcttccacatcgtctgtcggcaacctccagcaggaaggagggaggcctgcacttctagctctgtcaagggctccctgagcaaggaggcggtgagggcaatgacgccaggaggacaagagcggaacaaattgccctgattatgtaaggcagctctacttcctccttaggagggagagaactgggagctaggttcccccctgccccatgtccctcccataccactgggcctgctaggagacccctcaacagaggctcactcagtccgcccctggggcctgcagggcgtgactggggcaagtggcctgagttggtcctgctcagtcactgctcctccagtgtctttgagcatacatgagcccctccaggtttcctgcctgcaccctgagctggcagcctccctgcctgcttgcccagaactccacaccccaggcctctccctgccccagtcaccacagagcctggggaactctgacctcttccagaatccaaccaaggtcacatccagaatgccacaccctgactggatcagggctcaggtacgctcttctaagtgccccacagaggtctaagcagggagccctcctttttaggccccagaacaggctaagagtcagaccagccatatcctcaacctggcctctggactacccgtcccctccatgaacaaaacctagcctcccccagggccttgagccctctgagttgctatcacttccccctaccctagggcccttagggaatgctggagatgccctaggctgaagctcctaggtggcaaccatgtggctcctccctggcacagggcaggcattccctggacaggcccctttaccagttaggcctgggtatgttctgctctgcagggttgccctgcaaaggaggctgggaaaccctctcccatatagtattacgctttgtggagtcatcaacgtgactggaagctctggctatcaagctctttgagtttacaatgctgggaggtttagggttcctaaactgcaaatttatctcctgccataaacccagatgatgcagaagccagtgtgtgcctgagtgtatctgtacatgtatgtaggaatgttcactggtgagcacataggaagcgtgatggtgcttccatgggcacctcaggcccaagcacatgacccagtgtatgtctccaggtactcacatatcctggtgcctgtgtgtcgatgcacatatgtatcctggtgtgtatatgcccaggtttatggcgcatgttgggggaaggctcgcaatgaacaaagtaaggtgcatgtgttcctgagctcagccctgagctcctgtgctcaagtacagcacacagtaggtctcagggaacatctgtgtgtgtgcacaggcccagggtaccctcaagcagaccagtccctgcccttctgcccaccatttcagagggactagagccctgcactggtcacatccctagagccaggccacccacactgtgctggtgcccgcttctagccactacccccacagaccctgagaacaccccattgatggcgcaggctgcaacagagacagtctgaggcacagattccctcctgcatgtgggggagagccgcagcgaagccctcaggcaagggatccttcctgcccacccccatcccacagacaagaggatctggaaacatcacgaaaacgactgatcttcctgctgatggtgggcgagaaaaaattatctttctctgaacactaaaaataaagcccagtttcctaaaagcagggcccttcttagccagtggcttagagaggcttcatcactgaactcctaaggtagattcgttgaagccaagagaggaacaaaccctcggctgcctcattgaggggctcagcctcggagcaagatggcagccccccacccctgtgatccaaccctggacctaggacctcaccatgagccctgatgatgctatcagaggtgggcaggaagagggtagcaggaattgggtccatatgctgctcgtgcccagctaatgggctgacaaattagcaggtctcccctctaggaggtgatgcatgagcagtcgcccaggagagctgggggatgggccaccctccatagcactccttaggctcaaccctgatgccacctccatggctgcgcagccctgctgagattcctcaggggtagtggttgggactagggggtgactgtggattttaggcatggggaaggcagaaagggcataaaagggcagacccagcctcagaagccatacaaaaacaagcccagccaagaaggcccaaatcaaggccagggatgaaaatagtgtcagcctgaaaggacaccattaagaagggtcttaaagcgtggccctgtgatgcctccgccacaccacactcagaatgaccttgaggccatgaagagagggtggcctggggcggggggagcctgtactcccaggactgcccaccacactccccatcagagacacaggcattcagcccgggccctagggactgagtaggtgggagagagacctagggctgggttctggggcttcacccatgaagtggagctgcttctcccacacaatgacaggactgtcaccacccaagctcacaagggctgtggaggggacatagtgggaggtgaggctccatgtgaggaggggtccatggagcctgactcaaagcaaactgcagcctccagagtttgtgagccccaagccacagaagggggcaagctaaaggtggcccccaggtctcaaccagtcctctcagtggagacttaggccaacctgaaagcccaatattcttgatttgcccccaaaatcactatacagccccaccttccatgcacacaggacatctaaaatggggcaggattcacacattcttttgacagcggatcggcctggctccctttgagggccctcgggtcaggtgaggcagtccctgacccagttcctgtgtgggcttcctgtgcaaatgggccccaagccccacctacccccgcaccgcctcccctaccctgcccccgccccgtgtaaacagaacccgccactctctcccaggagctgctaattcctcgccagaactgctcggacgtgaaattggagtgagacaatgtgtgtttaaggaaatgaatctcgaatcttaagaggctctggagcccgccctgcacccccatcaccctgctctcgcccaccagagccaggaaaggagcacttggcatcagagaagagaaaggcggaggtgacattcagcgccaaattagcagccgccacagccaaatattgtacttgcctccaatcttcttttatttttccaaagaaaaggcttttacagagtgaaagaggctgttggaacactgaggctgatgatcgtttgtaaaaggcaggcctgctgcgcgcatgcctgactcagagccttcccttcccatcggcaggcctcccctccctgcccacagtcacatccgcaagacgcccgccgacgtcacaccccaccgcaccagccacactggccgatgtcacgggtgtccttagccaacaagacccaggggctctgaccctgtgccagtcctggacatgggacctgcctctgagctgtctccccgcctacatggggcccttggaaatgaggactcatttgtggtgtgtacaaaaccactgtgcctacagaggcctcaaaagtgaccagtccatgacctctgtaggggctcctcatccaccccaatggcccttagtgccccctccatggacagccaccctgcctctgccatcatcacttttatccctcccaccaggggctgtttttttttgagacggagtttcacttttgttgcccaggctggagtgcaatggcgcgatctcggctcattgcaacctctgccccctgggttcaagcgattcccctgcctcagcctcccgagtacctgggattacaggtgtgcgccaccatgcccagctaattttttgtatttttagtaaagatgggtttcaccatattggccaggctggtcttgaactcctgacctcaggtgatctgcccacctcggcctcccaaagtgctgggattacaggcatgagtcaacacgcacggcccaggggctgttttaaggcccctccccaggctgcctgacactttgttgaacactaccagtcatcctgaagttcaggcccctgaacccagcctacctccatccacgctaattaacccactgagcaggctgagcagataccctctgcatgcccctccactattttcatccctggccccttgaccaagtgcttggacaacttccatgggttttatcgatggtacagacttagcccatgtctcccatttcctcaaacctggctgccaggggcctgtccagtgagaggatggggagcctgctgagaggccccctagttcccacctggatggtgactggaacctggccctgtcccacaggtgcacccttcaagctcacactgtgtctcagagcccacctcagaccccactcctaaccaaccccaggaggtggaggcgtggcaatggtccattttgcaggtgggatactgggttcagagagttcttgtgactcacccgaggcctcagcgctggcaagaggcataaccagaacctgggtccaagctgcacaagtctcatgatgtggatgctgggctgcatcacccagattaccccttcggcacgaggccctcatcccctcactgccaagggtgttgcctgctgactcctctcatccgagtccctccccaggctgtaccccgagcagatgtggctccactgcctgtggtcacagaggtggagtgggggtgcacagaggcctggtcccttggcctcaatggggacagctctgatgggccagcccacctccagggctgtctgtggaattggctcaggcttgagaatgcctcacagcccaacttttcctgctgcccaaccctgcgtccttcacccctcacaggtgtggttcccaagagtactctccagtaaacacctgcacatgacctccatctcagagtctgactccagggaatggaccctatcggagctggtgccagaagtggtcccagaaggccaaccctaaagtgggcattgttgtgctgacgagaacctctccatggaggcagggggagccctgacaatcctgacatgtgatggatgtaactgctcattgtgaaccagcttgggatacctgtgaatgggtgcaacatctcaggtgtcagacaggctcagggaagtgtaattataagaactatggaatgggatggctgtggctgggagctatcaatgctttggagaaagacaaggcaagactgagtaagattcaaaacaaatttacggtgaaatgtgaacatgagaagcccccttggcaggatataagatgattctcatctgcaaccagaggcagaaaagcacaggactttatcacaagagtcaaagatcctcagggggttatagtttcaatcccagcaggctggttacaccaaggccaggccaagaccctgacagcaaagaagtggggccctgcattgtaggatgggaacatctgaatcactgcactcaagaaccttgacccccactaaactctctgagcctgcagaagtagcccctcatccctgctaaaatctaggatttcctctttgtctgaagatgatgcagaggcctcctgtgtgcaaatcttaagagtctcagagtcttttcccaggaatatgacctcagagagaaggctcagttctctcactgggtccagaacgagtccatgagcccatctccacatcactgagaccctaacaccagcctctcctctcttccccgctgcctgccagagtcgttcccactacttggcctttgtccatgcttccccagaaatgctcacccctcagctctcctcttcctccaggaagccttccctaaaccccctggtgagttcatctgtgccacctcccaagtcctagcagcctctccatctgtactgcacatacactgcacagcctacagcaggtcacctgctttggtccctgcgcatccaaatgtcccctgaataggacagagcgatttcggacagtccaggcccatgtgcacccaccagtgccaaatcctggaccaacctacagaagttcaagaaaaccctgtcacgggggtggctggacttccaggcccccagccctgtccttcacacccgggatccctgcactcaggcctcgcccctttcaaggaggtgtgattattaggaccttctccattacagataaagaaactctagagggcaactggcccgtccagcgtcctagaattgggaaggggctgctcaggatttgcaccccatctgtctgaatcttcctgaccaccatcctcacgacttctggcaaaggaagagagaggggcaggtgaaggctctgggagcttggcgagacgggaatggactccatggaggatgtcttgagggcttcagacaggtagatgtgcaaggcaaagcactgcaggaagagggaatggtgagggccacggctgggaggtaggctaatgtggaggggagccccggtttggagtggtaggtcagggaagggaggtgtgatctgtgtgaaggtcacggtggacacgaccaggcccgggtcctgcatctgttctgccctgcccccgcctcacggagccccatctccccctccacacccgggttccggtgcctgctctgaatggccaatgaggccatctgattggctcatcaagggcaaataatagcttttgctgaattcagctgcagccaatcagaggcaatcaagcacacaagaggcctgatgggccacacaggcgcacccacaggcaccagagctgcccctcagccaggctccggaagcctcctcctccctcttgtgtctgagcactggggagggggctaggaaccgagtccaggaggcctcaggaaaagaaggggaagggaccgagccggactccacagcatttgcttggcacccgctgtgtacgcagagtgccggagaagttgggcgttgatgggggagactcgggcagaggacgcgcaccctccctggcccactcacaggcccctggaggggcccccacaacagccccccagccacccccaacctggcctccagcatctctctctgccgagtccttgcctctcccccgaggagagcggagcctccaatcagggcctgggaaagcaatttttcaatctccaactgcaaacactaataccgctgaagctaattttacagatttccacttcgaggccttgcctttgtcccagaatccctcagcccgggagattagcagtttagagactggaaaaaataaggtattttaaaattcagcataaaactctctcttatactcggtgagctaaaaaaaaattttttttttgattggaaaagagcctgttagtgaaggaggagccaagtccagtccctgctccacagggtggctggaggaggggcactgcctgggccagcctctgcagcatggctcaaacccacagcctatggagaggcagagaaggggaagggtcagctctcatcctgccctgcgtgctgggaacactgcctgctgcactggtaggccctctgcttcaggatctggatggcgccccccttgaagccacccagcatttccaggcgtccaatcccaaaagtcttcccagctgaaaagaaaggcttcggccctagggatagaacaggtcacaagcctgctgctcaccgccactgccagtgaggctgattccactccaaaacaggccctctctgggccttggtttccccatcacaccaaaggtccaaagtccctggccacatgccctcctggtatacatgcagctgagcactgtacgccccctgcacacacacaccccaagccacacatactcggaccctcgcccatgcggacaagcaccggaggcatttggtggcgctcactcattgagcacctctctattgcagctctcacagatgagcggcataatcactccgctctctgggggccacgagctcagaaacatcctaatgaaaaataaatgtatttacagggagacgtcaaagccgccaggaccagtcaaagtaatatgcctgcgaccggcacatggacttttatttcttctccctccacgctccagagctgctcctgcggcgtggagagataaatattttaaatagcgacactttggcgatgcacggttatgcaagacaaggaataattagaaaataaattactttttttaaacacagcgttacaaacatcgggtgcatcagattactgttctctgcaggccagggccacacggctcagggaggccagcgcaacaaggacctcagggagcaagcacacaccagcctgtccccacagcccccagatggtgacacccctcccgcctgctctgggaggctcccagaatcgagctgaagaccacacttggcagcttccagaagatctcagcgatggaaaggcttcctccggcgtctcaccagcagtagcgcagactaaaaatagtttaatctccttgaaagcaaaaggagcaatcagcaaaacagacacttgggcccacatgctccccccattcctctcctcgttctgcccccatccatccaagctgtccccagctatgcattgtcaacttctacccatcccaggatagtgccccacagcctctgaggagggcagctattgcccatcgtccaggactcctcatgtctgcagccctacatatacacagcatgtgtcctttaaaccttgtgacaccccagaagggaggcaagacaggaaatgttagccctgttttacagatgaagaaactgaggcatagagaagtggagtcatttgcctgaggctagcaatggtagacaagggctgtgtgcaaatggaggggctcagcctctgcagaaaggaggtaggtagcttttaattagcacctagcctgagttctggttggctcccaagacacaaaagctgcccagggcaagaagaggcaagggctggtagagtgggggaggggagaggctcacacatttcaaggatggagtcagctccattcacagctgagtgggtctatcacacagatgtgtcttgcccaccgcagccagaccaacattgtgacttcacaattttcactcactggcctgggatagggtctggatcctgtgttctggctcaagcttgctaggtggctgagagtctgtcccaaccttctctgggcctcaattttccgagagattggccgaggcagtcagaacgaccgttgtctccagggatccctgcttaggacccaccaggaaccctgctgccctcccaggcctgcccctcacacactctgccctttctcactcagtcctacttctcagcatctgtctacctgccctcctttagtgcctaactgcctgaactaggaacacggatagtgtcctgttccaccgcctggttttacaagagaaaattcagacagggaggggaaggtcatgcatatgaggctacccctggaaaggtcagaggaggcagagcagatcaggacccagattctgatcccagtttcacacccttcataacactccttgtggctcccccaaggacagtactgtctgttcagagttcactagtggaatgaagcccccaaataaaatgataaactggagccaggtgtggaggctcatgcctataatcccagcactttgggaggctgaggcaggcagatcacttgaggccaggagtttgagattagcttggctaacatggtgaaaccctgtctctactaaaaatacaaaaactagctgggcatggtggcacgcgcctgtaatcccagctactcaggaggcagaggcatgaaaattgcttgaactcgggaggcggaggttgcagtgagccgaaattgcaccactgcactccagcctgggtgacagagtaagactctgtctcaaaaacaaacaaacaaacaaacagaaacaaacaaacaaaaacgacagactaggctctggcaggtagtccagctcacacagtctctcgaaatgccatcagggaagttggaactgaggcttcctttcctgctaaatatcgttccttgtaaccagcagctacctgcaaaatatcactccataatctgggctctgagtttttcaaaaactgtctagaaggtgctacaccctgctcaccctctctcaggggccaatgtctccccgcagctcctggaaacctctgccttggctccgcagtccatccctggccccaggtgctctggtccagctgtgtctccaggtccagtccttgcctcttgctccagcctttagccccaggtccagctcttgccccaacaaccccacgtacctctgccactgcctcaacacacctgaggcttggtttcatcacttgcagcaatgatgctgagcgcagagacttccctccaccttttatatatgaagaaacaagacccaggtcacctgatttctgaggctcttctttttgtttgattcttctcacagtccaccctcctactccctcagcttcagaagaagctcaatctcaataggtgatgatggggactgaggagggcagcccaagtggacagactaatgagggtaagggtatggccttggggaggctcagagacctgccctgactcactcagaaccagctaagtctttgggagctgccccaaagggatgagcctcagccacctgccaggttcagggtaatgccctcccccagccatgggtgccccaggtaacactacctgctagattatgagcacagggaaggtgctgggtcagggagccatccagggaatagctggcccgctgtcagccaaggcagaacttgctttatcagcaaagcccttccccgctgctggctgcgtaagccaggcctgccagggcttcccactgcgcagatggggaactgagacttgggacgaggggcacctggccacggggagagaaccaggctgctcaagtgtccctgtgaggctagctgagctgcctctctgcaccttccccgagtcccagagactccctgctgctaactccaagccaagccctgtgcccaacacacccccatgtacagggcagcagttctcaaactgtgttccctggagtcctaggcagtagacagggagtctctgggctcatgtggagggtcaggtgtagtgagagggtggtaagagaccagcccgggcttgcctacccacttagccaaagaaccccctgttcatcaattcactgtccagggcccagcgtagatttcacttaaccaaacagtaaggactcagctgctacaagagaagtgaaagcaatggtgcctggcgaactttctttccccaaactccctggcacgacagttaaggactattcaaaatggcaaaacccacaggaacaaaggaaatgtgcaggaggcactaggaacaacattttggaagctggagcagacagactatggtgattgacttaccaggccctggcaggcccactgctagcagcaatgggttaatgctggggaaccccaaaggctaggtcctgaaaccccagctagaagaccgggagaaccttctctggggaacctgctcagtcaggcctgtgccatcccttccccgggtttctggcccagcccaccgacctccatcaactctctaggctctggagctgagctggggcatgtgttagtgtatgtggggctctgtgtgcaggggacagggccagagctcacctgtgaggtggccccacatccagaaatctttcttcatcccattccctctttaccctttcctgggaaaagaaaaacatggagggggaactatgacagacatcatattttgcaaagtgagctaattacagggcagtcacacagggagatgagattagcagaagaatatttgataaaagggaacccaggtatacacatgggtggcagggaaaggtcagggtcaccctgaggagattgtggggcctagtgcttctgcctgggccacggggagtggaggcagttgcccccctcactcagtcacaaggctggggtgtcactgctgtccatagatgaagcacagatgggtccattttctctctttaaatgctcactactaatctgctgggcctggggacagggtcttcccaactctctcacctgactcgtggtggggatgcatcagcccagggcactcctcccaccccatggtgccctgctccccaactcttcagcccttggcactacagggtgtcacacaggaagatgatctgggactccgaagcccatcagtctaaaaactgtcccccagcagggccctgaggcctccagcacctggagccaagggacctaggtgcgaactcagaaaagcttcgagcccctcagaactccagccaggaatgtgaacctgatggtacacttgtaccaggaccccgggatgtgagtgagtccaggggagaagcccatgccctctgaccccaggtgactgggaactgctcactgctgcaccccaccagctcactggctgcctcctggggaggggtcagcagacatctgaggaaggaatatgagaggcaggcagtgcttcccaaccatcccattgattcctgggggttctgccttctcaccctgcagcctgctcccaccagagatcccctggcccacaggcactgcttccaccctccatcctcttcagcaccaggaactgtcccagactatcccatcctgtctgcctcgcctgatccggagtcaacccccgacacccctgcaggttccaactgtggctacaacatggagtttttaaatactaaataaataaataaatacataaatacatgaaatgtgaattaagcctgttttttaaaattaaagaaaaaaaggagactagggagacatgacaactaaatgcaaagtggttccttggatttgatcctggaaccaaaaaaggacattagtgcaaaaactggtaaaatccaaataaggtcttcactttggtttacaatactgtgccaatgttgatgtcttagttttgatatttataccacggttatgcaagacgataacttaaaggaaactggacaaagggttagggaatttatgtactatttttgcatcttctctgtaaatctaaaattattctttttttgtttttttgttttacctgtaaatccaaaattatttcaaaataaaaagttttttttttaatctataaagctatactgtcctcagacaactaacagacattgtggcaagaatgaaacaagaacaagatattattcttaaaaaggtccggctgggcgtggtggctcacgcctctaatcccagcactttgggaggccgagacaggaggatcacaaggtcaggagatcgagaccatcctggctaacatggtgaaaccccgtctctactaaaaatataaaaaattagccaggcgtggtggcgggcacctgtagtcccagctactcggggggctgaggcaggagaatggtgtgaacccggaaggcggagcttgcagtgagccgagatcacgccactgcactccagcctgggtgacagagcaagactccgtctcaaaaaaaaagaaaaaaaaaaagttccaaaagacatcctggaaatttaaaatgcaatggttaaatgtaaaatttgatgagaagattttctcacagaaagacacagaaatggaatattggagacaaaagaaaaataaaaaagaacagggcctgagttaaggtttctagaaagaacagagaaatgagaagggaggaaacagtcaaagaaaccattcaagaaaacatcccacaactgagggacacaagtagtttgaaagtgtgcactgagtggtaagaaatgaaaagccgcacaaagataggtcagtgtggaatttctgaacactgggcaaagggagaaaatttacaagtttctgataaaaaccaggtcatgtacaatggatcgggaatctgaatgactggggacctctccatagcaactcaagaagctggaaggaatggagtgctgccttagaaaatctaaggcaaatggtttccaccctggacttccaacccacctgaaatctctgttgagcgttggggagaaggaaggctttctgagacatgacagtctccaaagtctggctcccctgtacctgtcctcaggaagccaactgaaaatgttctcagctgggcgtggtggctcatgcctgtaatcccagcactttgggaggccaaggcaggcaggtggatcacttgaggtcatgagtttaagactagccttaagccttaagactagcctggccaacatagcgaaacctcatctctactaaaaatacaaaaatgagctgggcgtggcggcgcagatctgtaattccagctactcaggaggctgaggcaggagaatcgcttgaatctgggaggcagaggttgcggtgagccgagatcatgccactgcactccagcctggggagtctcaaaaaaaaaaaaaaaaaagaaaaaaagaaagaaaggaaggaaggaaggaaagaaaaaatgttctctacaccaaaatgagggagaagtctaaggaagaggccatgggatccatgaaagaggggactccaaccccaagagggggaaaggaaatcccagggacacattggtgccgcaggctgggagagcagccagtcttccctggagcaaggtggaaggctctgggcaggactttcttggaaggtaaatttaatttaacagaagcccaggtgtatgagagccaggtcagataaagtggcggggagttgggggcagagtgagtaaaggttcacagaagactaaacaaataaactaacaacagctgggcacagtggctcacatctgtaattccagcactttgggaggccgaggcaggggaagtggatcacttgaagtcaggagtttgagaccagcctggccaacatggcaaaatctcatctctactacaaatacaaaaacgaggcaggtgtggtggtgcgtgcctgaattcccagctactggggggctcaggcaggagaattgcttgaaccagggaggtggaggttgcagtgagctgagatggtgccactgcactccagcctgggtggcagagcaagactgtctcaaaataataataataataataataataataataataataataataatgataataataataaaactaacaaaactgagacagtttttactggtaggaaacaactaaaaaattgtatccaaaagtcttccgcaaggcgcagttctgaattgcatttgctgggtcagggcaatgtcaacagtgagcctcaccatatcatgttatgcacaaaagggcgagggatgggctgggggaggggtgcaaagccctcctctcccgcagcaggatgcccacggataatgcctaaaactgaacaatcaagaagtagcgacataagtatgtcatttagagatatggagctcagagattagaaagtgacagcctctggggagctggaaatggagaggagggggctgctgtgctcctaacacaactcgcctgataaaaccatgactttacaccaggcgcctgtgtaacactgatttgaaaaccctaaatttaaaaatccatctagaaatataagaaaaagaaaaaaaaaagagagagggaggctgggaggggaaggatagaaggatagagagagaagaatgtaggcagaggagtcagggacaggggactgactgctttgactccagcctctggcctcaggacagtggccgtcaaagggcagcaggcgacatcactacttctgtttactcttattgcaatgaagacagtttgagatttcaattccctgatcaactgggtacacagaccaggctccttagactgaaacactgaattggtattggtgatccctggtcaggggtcccaccccaacactcccaaaagttggcaataatcacaaagcaagttgagggacagcagccacaggcatctgagagataatgccatccatcctagaggacagtgccaggtggtaaggaagaagctccaaatttctcttttttttttttttgaaacaaggtctcattctgtcactcagactggcgtgcagaggcacaatcacaggtcattgcaatctcgacctcagctcacgcaatccttccacctcagcctccccagtggctgggaccacaggtgcacgccaccacgcccagctgatttttgtatgttttgtagagacaggttttgccatgttgttcaggctggtctcccccagagtctatgcagccaaggaagcactgtctttgtacacacctctgtttaaagctgtgccatttcaccctgaccaacagacagccctgcctgggaagggacaggagttagaggagggctgtctgagaaatggggctgagtgggctgcaaatgtctttgccacctctcacaccctccctggaatccccaactctttgtgtaactttcaggaaatgcacaaaccagcaagccctcaacccagtggcctccttgtatgggacagacatcctgtcccagggggagaacgaaggctgggcgtgagagagcccctgagtcccagggagggaggaccctcatgtgagcctgcactgcagacctcatgccaagggcaagctcagctgagaggagtccaacacagtttggatgaagcccagcgcacctggctcctcagaaggggagatgctgaatccagacgccctgggtgggctcggttgcctctgcagatcatgcagagggagcatgggagctcctcaaaaggcaggacagcaggccaggtgagtaccctgggagaactccctccatcacccaggccttgaccaggcccaggccatggctcattgagactgaagcccccccagcgacccaagaacctgctggcaccccaggatgtgggatcaccccaaatattcacctttctacatcccacgtttactgggtactcacttcagaagtggcccaagattatttgggcactccaggatctgtggaggaggcaggtcaactagcttgggactagacatgaccttctctagtttgcctagggcatctaaggctgtgagttgagtgtgcacattcctggagggctccagtgcccagctgctgctgaaaatcatgcaggtgggagaatcagaccttcctgggcaacagaggggcatgtgtcctaccccaggagctggtctgagtgggtagcaaagcctcaatctggtggccctgttcaatgagggaacctatccagcctcctgggaaaccctgtctgctgtgggggtgaagccacagcccacataaaagctgtggtctgagggggagacacagtatgccagcctcaggggtcctagtctaagaggagaagcggccagacccttcttgatgcagaggatgagttttcagggcctagtctgctttgcccctagaaggctccagacctgctccttcgtttcccctgagtggctcctctaccacttagcaacggagacaatttacataatgcatccagtgtgagagcaataatggctggggaagcagggtgcccgttagtggctcctcgaagggaaaatacctgctcccacaccactgcctcctcctctagcgaactgggctgcaaggctgctggaaagcaggtgcctttaagtgcttggctgctgccaagaagggcccagaaaggatgtgccagccctgggactggggctggagcaacctcaggacagagatgcacatgggaggaaatttccaaagcacctgttctgaacataaatctacccagctgtactcctggagtccatactcctgctgggcctaggccctccatcctgatccttcccggaggaggaggccactccagcaggcggcatgctgtagtcgggaggctgggtgccaggctgcagctgcccgggaggtggccacatttgaacacaaaggcagcgatggaaggggtagatagaatacgtacaaattactggcatagtaattgctttttatataaatgttctttttaaaagttttccctggtgtgaaagtccgtctttagaaggaataaattcactgcacaccaatttattccacactggtagatggagcataatgaaggctcctccgtcagcacctgatcaagaggcaagtggctgccacttgacccagcttccgggtctccctgcacgatgatgcagtgcagtggcagggccaggggtctttgaggggcagcaggtctgcctgccaggagtcagcatcaaacccagactctaagactcaggtacaagttcaacagatcccatcagtgtcccaggagctgtgcccaaatgacgaacatgaaacacgggcagctgcaatcacagtgattcatgctgatggggaggcgcacagggctatgggagctggggagcatgggggaccctcactttctaggatcgggtgaagggaggtgttaagaaggcttctaggggatgaggtctccctggcctgcctgcaaggcatgcagaggaaactggattgtgacaagcatctaggggttgtaagtgggagtggtttgtcttgtactgtagaaagctccctggtggacactagctcttctctaagcccaaaggaaccaagacaggtccccctgcctttggaaggtaactcttcagtggatccaagtgcactggagaatcacctgaccatgcctgcaaactctggaggatgcccccactccccaggaggcccgggacctggaaatgaggctctggctccttgctccttaccagccacagctctctcatctgtgaaatggggacaaggtcctaggtggcctcaccaccagcctctgtgagcactggattagggatgagaactgccttgcacaaggcctatgatctccacagtagggatctttggtccagccccaccccaggatgcacccccaaccacctggcagcctgcccccatgcagggctgctgagcagtgtcagacagagtgactggggggatgctcaccatgcatgggggaagtgtgtgtgtgcgcatgtgtgtgtgtgtgtgtgtgtgtgctcctcacccacaattgagatttctcagctttgctaattaatcagctaagtagttctcgcctgctcgggtgacagagctctccacacctgcctcctcacagtcccaccctaccctaatgtgtgcccgctcacacctccacaggcagcactcagaactgcacatttgtgcacacacacatgcacatgctcaccttctatgaccactcccatctatggacacacaaacgctcacatgttacttacagcactgacgcacaggggttcacttattctcttctccgtgtgcaggcatgtgtgctcacattccccatgcagcaccacgcatctctcatgaaccatgatcagcccatgttccacctcacatgagcctcagcaggtcaggaactgtgtctacagtggatcacgggaccaagaatcaccagggctagctgccttcccagtctgaccgcctgcactcaggtggactcctggaaagcctgggcatgaccctgccttccggccatggtctccataccccatttgatgggaacactggattgggcctgccagagattcctgacaacccccatcttctgtctgtacccgaaagatgcaaaagctgaaggcagcagcaagtatcagacaccactggcctcagcattgatctggagggattcctggaggaggggagctgtgggctgggtttaaaaagctgggaagaggcctgtaagggggtggggggagtgaggagtgtggcaagtggacttgaagaagctgagtggtctagtgagagtgaaggggaggacacccaaaggcctgagaaaggctccttgctaccctagcctggtgccacacacctgggccaagccttcaagtcactctaggaatggccagcctccctggccccagaccagtatctgggtagccagcacactctcacatccagctcctctccactgctgctgggccctccataccctcacaaagagcaatccagggatcatctatgtggggttgagtcctggcagatgccccatgcctgctacatctcctagggcatctggcatcaaggctcagtcaaccctgatgcactagtctcagtttctccatgggggcagatggttcccaaggtcgaatgggacagagtcagagccgggatctgtcccttttcagtcctcagagcactgccgctttgcttctccatctactgaatagttactagctgggcacctcctccatgtcagccttgtgggcacctatggacatgtgtaccccacaggcatacgtacacacctgcccgcctgcgtgtgtgcatagcctgcctctccatccagactgcacacccttgcatactgaggtcaggccctcaagctccaagggtcggtcacttggttccctgctttaggagaacccaaagatagacaaggagggggtgtgcctaggagccaacccttgcctcagtctctccccctctccatggagcaggccagcctctgttcagaactgtcaggtcccaaggctgggagacagatataagaaaaggtttatggctccgtaactttctccaaacataaaatctccgcttacaaggtgagggcagccacactcagagaaggtggagagaggccatgctgagcctccatctcctgtctggttgtggggaatgctgctcctgccgcccctggggccggctgtggtttgtcagaaccaattacttctctgcctccgccaagtgcttggggctccatgaatccgaggcaagtgtctccgtggctgccactgatccagcaatgaaagggagtgaaggatgggggaggaatgcagattgggtcaactgtccccagggggccgagcataaacccattcagccctctgtccccaagccccatctcccaccctcgaacattcagaccagcctccggctctggacatggcagctctgtcccttttcagagatggatgcataggccggctggggtgacagcagaccctggctactcttcaacaagatgcaagggctgagtttgaactgatctcccgctgtcctgctgtaaggccagcctccctagggacctctgaagagaaccagcaagttcatcagaatagtgtgtgtgtgtgtgtgtgtgtgtgtgtgtgtgtgtgtgtgtgtgtgtgtgtgtgtgtgtggctttaggaaactttcacagacaaaccttgctgatccccaagatggaaggattgagcggccctcacttcagggaagggccctgcagcaaagccaagggttagcgactaaaatcttccaggcagagcagtgctgtctgcctagggaggttctgttcatggccactgagattgtctcttccttaaactgagggacagagaacccaggcagagaaccttccagagatcctgagagattccaccctcaagaacccccgatcctcagctctggcctcagccactctattttcttatgcactaacttccccattcccaacgccaacatctaggcacaggtcagagttgggtggctttgtatgactccctactccattccatccccttctctctctttttttttttttttttgagatagaatcttactctgttgcccagggtggagtgcagtggagcgatctcggctcactgcaacctccacctcccaggttcaagcaattttcctgcctcagcatcccaagtagctgggattacaggcatgcaccaccatgcctagctagtttttctatttttagtatagacagggttttgctatgttggccaggctggtctggaactcctggcctcaaatgatctgcccgcctcaggctcccaaagtgctgggattacaggcatgagccaccacgcccagctgtccatccccttctttaagcccatgaggcctgaaagacaaggtgtcaacttgttgactgattggagaaactgactcacagtcttccggggtataggggcccttccttttgtctctgcccatctcctccccaacagcatctctgcagctagctccctggatttccggccaaagaaatcacgtacccttcgctggtccacaggccctattttttcaagctctgccccagcttggtggcctttgtgccatcttagggagatgtccctaaaaggtgtcatgatcaacagagatgaagggaccagtttctaaacccctggactgaatcaagcagaaaggacaccttgggcatgtgaacttttctaaactgtgatcaacctctggaagggcaggcaattgacagtggttgtgggggtggagatgggacaaagacaccccacacttacgcagggctaggtctgcagccgttccttgctcctgctcccctgagatcttcacataccctgtgagacagtactgcttggatccccatttcccaggtgagggaatcaaggctcagagaggcaggacaacatgtcccgggtcccacagtgcctgcccttcctgtctgcttcatcctttcaccacttcccaccatccagctattgcccctggcacaggccctaggttcaaacccaaatccagcttggccttagctgtgggaccacaggcaggtcctaccttcagaaggcacagcttttcctaccgcttctctcccactccaagctgttccccatcccctgggaactgatcttggaagtgccctctagtgacctgttggcacaagctggaagctgaaggcccctctccatgactgcaccaccagctggtcccacccagagatgctgctcccacagacctgcccctctgtgcccatggcctccacagaaacctggggggcaactccgtgctgaggctactcagaatcccagaagccttggagcagggttccctgccccagcgctgccctgccaggactctaggagccaggggcccatgtgcagccaggcctctctggggccttcctgccactgcatctctaccttgtctaggctgttctgatacaataccctcattccagggggcaggaagagaggaggcctgacagggaacaagggactgagaaggggacccatacctggcccagcctcagcagcctggaggagccactggggtgggggaggctccaggtggctggtgccacagaaggggtggccaacatgagccagggtccctgggacaggcatcccaggacagtccccctgcccacacagcccctctctgatgagggcgtgtggaaggatatgggcgacctaagccagtcagctggcccaggccagatgcctgccatggatgaaatagctttagaaaagcttctcaaaaatggaattttctcctgccagcaacagagtgtgtgtgtatatggggggagggggcggggggggggggtggtggtcaagatggcaacagccactccccatccaatcctgtgtctccccacacagtgctcaagagagaacattcccagactttacagtgggcgggggagaagggtaccagaagaggctgcccccaggtctgggcctgggaaggaaagaggcagagagcaggccgggttgggggggacacagagggggtctaggcagggctttggtcaggctcctatgcatctgcctctctctacccaattatgctcgagcagcggcctcaccacgtctcagacgccctcccgggagccccccctttagccccacgcatccctgctgggtgccaagcaagaggaccatatggacggaataataagacaattaactttccattaaagaataatatatgtgggtttttagggaggcaagcgacagcaatccctatccagcggcatatttcacacccgcgcttccccactgccccccaccctgatgcgccccacatccccatcatctacaccaggagacgagggcaccgctgggcctcaacaggaggtggctgggtagaggggtggaggctgcgtgatgagcaagtgcagagcctggagatgctggcttcaaggctgcgggagccctgcagaggggctgtgccatgcttgccacccctcacctgactctcggtgcgtcagtgcgacagcctgtaccagtgggggacctggccaaggagctgcatgcctgtctcctgtgggcacatgttaaccacagtgctctggtgaggggaccttctgtggggtctaggggggacagcttcttgtgctcctcttgcctggccctctgggcgcccctccccaccagcttccttcttcctcttctgctccagcccctcttaggttctgaggttccctggcacttgtgggcactgctaatcccactctggatgcccagagggcacccgcccagagtgtaccctccctagatggtaacagagctcagcctcagccagcacccccagagtcagtgtgtgagtgtgcatgtgtttcagatgttggtggtgccggctgaggtggagggtggaaggggacagggggaggcctgtctcaaaggcacctgcagagtggccctgtcccacctacctgagcccctcgagaaagtggccctggacatggccagactttggtcagtgccgggagccagctccagatgtagtactccacaaatattaattacacattcctgaggagtgctgagcagacagggcacagagatggctgggggcagagaagatggagtagatggagtaggactgtgccgctgtcactggttggaaaatgccattcctggctacccataagaaatggagacacacagacaccgttgatctgaatcaccatgactgtccagagaagcacagaagtgggaggggaacaaaagactcaggttggggatttccaagtcctggggtcccattctctgtgaatgcaggctcagcagtcttggggaggggcggccccgggtagctcctctgctagacagctccccaaccaccactcagggctgacctgccagggatccattatgagactggctggtggagacagcagccagggcctcggtttccccatttgtatgacaggatcacaggaataactagcagcatgtagctgggctaaggccatcatggggttaaggcaggcaggacatgggtcacgccgtatgccatttctgccctgaccagcgcgcaagctatgagtggttgatgaggactgggaaaggcttccatgggtccagaattggcttgagccttcccagagggtagcctgtggcctccaaacatggctgtctcgggttcctgcttctagcccagctctggccaggcagctctagcctcagccccgaccccaggcagaggagcttccctccttctatagagatcctccaaggaaggtgtctctccgaggtcaggaatgcatcccggggctggcatgcctcaggagccaactgattcttcatcatgtctgactataatctctcctgctttgccttcccaccaggttcccagcattgctccccctggaccctagacacctagccagaagagggcaggttcctggctgtacccatcagagtgacctgggcttcagagaggggagacctgtcccagctccacatcctccccacccccattccccatgcacccccaggcacctgatgaattattcatcctgatcaacctcattatgtaaatgagctcagagcccaagcatatgcactctattctcccccaggatgggacaatatggtgctgaagtgggagggtagaaaagaggctccagacaccttgctcaggccctaggggctctgcagggggacatcacagtagggtctatacttttgtggcctattgagggcaagagtgggccacgggttgggggagttgggctggggaacccaggaggatgcgactcagggtgtctggacaagcgtgggggtggggacaatacgtaagcaccaggccacaaggagagctccagctatgcactagctgcgatgttagatgaggaaatgagatgaggtcttcacagggagtgcccacatgccacagaagtatgccacagtttcaacctgcaaatgggccagcctgcacccagccatgccctcatgggggttatggtgaggtcaggaggaggaaagtgccaaggcaaggaaaacatccccaaacgctactgtctgcagtttctgcactctggcagctgccagccctcatggctccaagctactgggagtggggcagcctctaggatggaggcacgcaggctgggcagcctttgaggggaagaaggccaaggggcctggatgccagatcaccccagctgtttgggggcaattcagaatcagctcaaggagggctgaggaggggcagccccactgggggccaaggctgtcagcttggcagagctggtgccagggtctgcagcagtatcacagctgggccagggcttttctccaagcatcctcctgacctatcagagccaggtatgggctgggtacatggaccgtcttcgtgtgcatttggagagcaatggtggctcagtcggggtcaggggtgagttgtggagggctagggagcaaactggttggctcctcctgctcccacagggttgccctcttcctctagaactctacacctcaacccccaacccccacgcccacctcaccagagtgccccgtgccaagaaacagccccagagctgttggcaggaagtaagaggctgaagaagcagaggaggaaaactagagcaggacagagagccgctggagcgctggcagccatcggcaggcagagacactccaccagagtgccaggagaagccggggatgccaggtcagcacttctctgcctgcctgcctgccacgctgagcacggccctgctctggcccagctccctactgccccaggctcatcttgtccaccctaccaagaggggaagtggagccacagccggagctgcacgttggaacaggagtcaggagccctgggtccatgccccagctctgctacaagccagcagcatgaccaccttggtgactgctgggagggagagggtgggggagacaggctcactgatgaaagtgtctagaatctctcaagtcccatgagaaaggaagggaaattatccctgggagtgaaaatgatcaatgagggaaattcaaatttgatttccaaaaaaggggcgtatctgtatcagcctgtccattgctgttttcaccacttcatcctccggtcagacttcccagctgtgtatgggtcaagaatgaggatcagagaggatccaggctcacccaggggcacatgatggtacgctgagctgggattccatctctggttctcagaatctagcaagctcactggtccagacagacctcggccatgacgtatgaacactattttctcattgccagacattcagagcctgagttgcccgtgaatataaaataaacaacatcttcaagctaaaggtttgaggcatgaaggattattgactggaggagtaccgttaactcctgatatgtggtatagcttatgtcccgatatgaaacttggaaaggtgctggctgcacacatcagggagctatcattccttcattagcccacacagctatccttggcagtggctacttggagcctggttagtgctgggtgctattcctgagcctaaattgactcctgttccggaacagctttttctacagcactttctctggaaagctctgctggcctccaagtgcggctgagtcattcagagttcacaggaagacagtgtgatggaggctgctgacatccaagcccagcaaccaggaaaggggtgtttagtgtcgctgggccactggcagggaggacacagacctccagacctggactctcccttcccacggcgttgccacgtacttagccacccatgaccagccccagcctgtgccagaggtcctacattcacacccaatgtcaacacactggctgccacccccacttcctgggcaccagctataagctaagcatgaggaagggattgaggacaacccctacggtccctgccccaccgaggttacatctgctgaccctggccctgaccaacagggacaacaggaacacagtgggtatataatctccaaaccctggacctggactcctgactgaaccagcaacagtaggttggcttactctgctgttcccgagccaactctcagtgggagacccccatttaatcccctgctcagttctggtcagtacctcctggcccaagcccccggcaacaagatcctcaaagactgcacgtaccccgagagtcgtagctccatcactccaagagctcggccctcccagcctctgcatctccacgtagagagcaatggctcaggagcccggggcctgacagcagcacattttgcagcttccgggggtgatggatggcctgctcttcacatcactatttcaaacattaacataatctcccaggatggatgtggtggctggtgcctaatcaatcacccctcccacaccttgatccctcatcccaccaggcatgggatttccactgtctcctgctacagcacctcaagcaccgctttcgggctggtatggaccggccatcccgttgtttcctggatcccttcagctcctgtgcacccctgcgtccactgacccctcctgggcctgggctcccaccccaggtgtccctcagacacagacctctccctcctgaaagcccaaaaagctccaaatccctttcagcaacagggtcatcgtccaagccgggtggtggctccgatcgttgcctcaggaagagcaggccaggccccagaggagtgctgcccatccagtcatgtcccacctgcccccacgggcccatcaggtcccaccacaccaggacctccattaaaccaaatcttcctcactccttatttctgaagcttttccccttcccttggaagagggtccctgaagagacagcaagtggcaccgggctcacctcacggagctgctggacgcctccaaaaatccgcatcacgccgtcgacctcctgctccagacgccgggcccagtgctgcatcctgtatgcagagagaggagagaggtgtcaggagggcctgcccagagctgcacagccccaccccagccaacccgggggcactgggggcaactatccactcacaccccaattttcactagaggaggacccacagcaaggaaccagcaagcacctgcgattcccctttgaagtccagacccagtggcccaggtgctcctcatgcactgtggggtggcgaggaggagagaggattgcattgtggatgtgctgagggagctcagcagctcagagaagcctgcagtgaggctacttttcattgtgaagagccagcccttgatgtagctgctctgaacttggggacttctggacaccagggaggagggagacatgagggagcctcagggagtgaggtctgctggatcttggagcctcctgttcccaaggccaggtggggcctagagaaggggacggaacactgctgtcaccaagtcattgtgtaactgggcaggtccctgcccctctaggtctcacctgagcagtggacgtggagagttccagattaggcagcccttgcctatccaacaccctggtagacagacgcttacccgaggctcattgctggatgtccagcaggaatcacccactcaggagtccactgcagaccatcctgcctcacaatccacctgagccacatcctgagcaggtctccctcacactggtaccaccctgggattgctctttgtttctttttcttttttttttttttttttgagacagagtctcgatctgtcgcccaggctggagtgcagtggtgcgatctctgctcactgcaagctccgcctccagggttcatgccattctcccgcctcagcctccagagtagctgggactacaggtgcccgccaccacgcctggctatttttttctatttttaatagagatggggtttcactgtgttagccaggatggtctcgatctcctgaccttgtgatccgcctgtctcagcctcccaaagtgctgggattataggcatgagccaccgtgcccggcccaccctgggattgttttaacccatttccatctcagcttccttctctggaatacggggataatttggggccacctttcagggtgttataagaacacatgagaataggtaagtcaagcgtgttcgctgcatggggatctttgtgagtggacaggatggacagttggtcacgtggccctctattctcagacccacaacctggaagaaggaaggagtctggggcaaggccttgcctgggttcagatacatgacccactcccttaagcagagccagatcaggcgagcaaaaccacactagaccttgccagaggccagccagagagaaccacacagaaccacaaaggtgctctttgccctcatgcatttgaaaaggtatctcaacttctccatcccacttgacacactcccattttacagaccaagacctttccaggaagggcgcacaaaaaagttaccatgaagatttaaataagccatgggtcaaacacagcccacagggtacagtaggggcagggtgatgccagccccccagcctctggaggtaccccgggagccatggggtacaggagattgcatctggtcccaactccctgggcctgctgcctcctccagtgccacttgggccaggactgttctggctccatggatcagaagagcccaagcctctacctggcctcctgccctgcctcctccactcaggcctgtgactaaggggctgggcccatgcaactgtatgtgcctgggtcggttggcatgggaactcggagcaggaggcaggcagatcactaattgcaatttgccaagctgaatgtcaggaccatgatggaaaaaaaaaaaatcaacatcaaaagaaagaggtattagcttcggcttgttgctggctgagccacagccggattccctcctccgctccccaccacaggggaaaatctaaccctgagtgcgggtggaggccaggctgcaggctgggctaagaagggcaagcaggcctcagctgccagcctggggagggcaaagggcagcagaaaattgacagcctgcgtgacccctggcccctgtccaccagggcctggttgtgggtggacaacatagcggatggctcctttgtgctcctgcgatggagccctgggggctaatgttgggatgggctatcacagtcagccaggcagggggcagacaaatgggcagagtgaggatctgatccccaaagggaaccattagctctgccctggccctgaccctgacctcagccactcactggtgtagagaacaaaatgccaatcaatccttcctgggactcattatgtgcgagggcatccactacgtacaaggtgcagtgccagcatgtcacctactttctcgcttcagtccttacaaagaagcaaacattatcatcccaccttacagataaggaaactgaggcatagtgggttcaactgacctgtacaaggtcacctatccaggaagtagtgaacacaggacttgccctagaagtgtgctggagtcacaaaagctgactcacaaaagctgattctgtgcacctctttccaactctgcatttggtaccatcacctgaggagcttgaaataggtcatggtgggaatatttacaccacaggaattggcaaatgctagaaaccatgtttttccccctggagaacaaattgtaaacattcagcagcacattactgattccaccccaggctgttgactcttctagtatgtctataggtccctgcttctaggatttcacagttaagtaaaagaaaattaattgggagaagagacatggatgccaagttttattttgctcagacaacacattattataatcatcatcatttcatctaaaaaggctatttcaacactaaaataatttttagaagagccaagtcttaggataaagtccaatccttccccaagatatacacgctcactctccctccctccttgtctctctctctcttacgcacagtctccttactcccaccctgaggctgagtagctctagactctgctatgggctgcaggaactggcctgctatgacacagcaggccacacacatgtcctcccaaggtctagaggtggctccagccctttgcctggcatcctggacctgctgggcagaccccaagccctagcacattgcccatcagcacagtgccagggaaaacaagttactttgattattcacttaaatcaaactcaattaggaggcaatatgtgtgtctcagagttaaaagaaaataattcattccattgtcacagagatgtgactttgtgggttctaggacttcgccagtgtcccagtgccacctccaaggggtgacacagaggccctgagggggccaggagttgactatgcacctgcactgttcctgccttgtggacgagaagccacccaccaagccaggtccaaccctggccagggaatcgtactcactccagcagaagggagggggccttggaaagacaacggatgcatgggaatgtccctgcccccactgggtcaaagataagctgatcaaatcctgcccagacttccctctgcttggaatcaagtgcctggctcagccaatgcctccctgaccagacaatgttgcccacaggccacacacccaacacggaggtggacctgctggctccccacatctttgtaattttccatgcttttcattgagatgacactgcttatccctaattgcttctaagtgccaaactaacaaggcagtgaggggagagtggccaggaggagatgtaggcatctaggggctgcagtggcttaatgactggtgtgggcacaagagactagggatcaagtcacgtcctccaatgtgcccagccctagggaggtgaacacattgtggctccatttcccagacaagaaaattgaagcccctggtaaggatgggtacagggtcacatacttaaagagaaacagacttgtcctgactccatctattccatgatcccatctttccaggacattgtagcctttgggaagcctcaggggaaaggcacttctgccgctgtgtgacctcaaagagttctgtccctcagaacctcagcttttccatcggtaaacaggggtaataatgactggctgaatagtttttaatggtcaaatccacaggcttttactggacagtcccctgagggctagcagctcatgcaatacagcccctcccctaagacctaaggacttattgagggctcaggacatcttctatgaaagcttgtgtggggggtggggaggcttgtggggagggggcactgcagaagaggcctagcaggctgaggcagctctgcaggtaagaagatgacaccctgagttgcaggatgccaggccttggtttccagggcatggttcagaaccaagaggagttggggagggagaggggatatcactaacaggcaagggagtgacatcatctgtgcgtggggtgagaagctgcagctgagcacccctttagcagacaggatcattgagaccccagctagaaggctgggggaggctgcatgtcaaactgcatcgcattcaggtgggggcttccagcttaggggcagctgcaaatgctcaggggagggggagggtaaagaggaagggggttggaatggggaggaatgggtacgggaacgggaacagggaggaacgggaggaaaggggaggaagggggaggaaaggggaggaagggggaggaagggggaggaagggggaggaggggatggggaaaagggagaagagtccgtgtgcagatgcagcagcatagattaaactgttgccagttgttaattttatatgtggagttgttgatcagaatgtgatttaattgtacagtataatccaggcttttggaataaattatgcagaaaactcatctataattaaacaaatcaaaaaaccagagacaggtgacacagcaggttcaccctcagagggcacgggtgggtgtgggcagctggacccagcagaggggcgagaaaggatgggggaggggctctgttcaagagcagacaggggcaggccccggaagggtcaaggcctggtagggagcaaggggctcggaacacccgagctctgcctctgtgggccttcttaccactcacacggaggcattttttgtcatcaaagccctgctgcctctcccagatggcctgtctggatcaaccctgttccactgggcacctataatcagtctgtggccttcccttcagcttggcagttcagccgctgcgcttcgtgagggagtgaggggtggatactaggggtgggcagcaggggaagcaggagggctggatgacaggacagcaggaggctggggcaggtgagcagtgtgagggagcaggcacagtgaaggccactgctgccaagtgcacggtgaagcaaacttggcaatggcggggccccacgtctcttgcttctctcatgataggctggccaattattctcccagctctggggaaggcaacaatttaaaataaagtgcaggctgggcatggtggctcacccctgtaaccccagcactttggaagccccaggcgggcagtttgcttgagcccagaaatttgagaccaggctgggcaacacggtgaaaccctgtctctacaaaaaatacaaaaattatctgggtgtggtatcgtacacctgtagtcccagctacccgggaggctgaggttggaggatcgctgagcctgggaggtcaaggctgcactgagccaaggccatgccactgtattccagcgtgggtgacagagcgagactgtctcaaaaaataaaaataaaaactataaaatataaagtgctacttaattattctggttatttccactggcctgttacctcccacctcagcacctctgcagtcttctgaaggggaaagacagggtggagaggcaagcaggccactcccccatcccagcctggagaaggcgtgcttcccccagcagtcactccaagctcagaaagcagctgaagcagggcttggaacaaggctggtccctcccctaggccctcgccctgctgcaaacagcaggaagttcaagggtgcactccaggacggtggcatctcctgggccaccttccctggggagtcctctctgaccactcgggtggatgtccctctatacctagtgcctgagtgtactgagtgtacagtacctagtgtactgagtgcctagatccagccctggcttttgcaagaccttgaactagacctttcctgttaggcttccatttccacatttggaaaatggagataaagttcaccattccttttacctccaaggacccaaagaggagctaagtggaaaccacagccccacatgtgggatgctagcagtgacggctgccccacacactcatggcacacaggtccatccagaaggtgggactgctctcaccacagtccagcctccctcctcaagcctgcagctccctaaacatgggatggttgtgcctcctccttagactgtggcctccaggtgggctgcagcccctctctgcactgcccccagagacccaatgcagcagagacctggtggggtgccttgtccaaggagccctggggaagggcagggtttcctgtgaccagaccttccttcttgcttgtccatgcaaaagagaagactctcaggtttcagcagctttgggggctcaaagcccagggcagggcctcccaaggatgatagggctggcagagggcaacagtctagccgagatcactcactccccagaggccacctgggccacaagattacagtgccttcagatgtggtggcaaatcagcactggcctcacactacaaagaccacagaggggacactgagcccagagtgagagggaagcatgcttgctcagctgattcatgatagagtaaggctccccagctagccacctaccacttcacaagctggcacaaccaaggcacagaactcaaggggggctggcccatcttcaatctatttgtgattcagttgaagggaccctagaatgagcagcatgatgcctccaggagcaccgtccccatctcacccactcattgcatgcacacaggaaccaaggcagcccagttagcacagggaccttggagaccctgaggagctggggaggggcaggtgttgccaaagcatgaatgggtccaaagccatctctctcgaccatgtgtgccttgggaccctgcccagatacttcctggtccttcatgaggttattaattacggggctatcccttccctttctttgccgagaagagcttttccttctaattggtgctctgctgggaggcagcagtctgtgcctccccctcagactaacagtgagccatcatccggcattaattagggcaccaggtccagcccaatatttactcatagcagcctgctgggttggggggagtggagggaagcagcacagcctggagccaggtagcagcaatacccagcaatacccaggtggcccactcggctctgcttcttggcctctgcgggtctcagtttccctctctaaccaaggagtggtagcctgaggcctccatggaccatttagggatccatatctcaaggggtctgatgggggccctccctgcctgaggcctgagccagtggtgacaggccagggatctcactgcactgccttaattcatctgcatagcagccagatcactatccgcaatcctcagagggaaaccgaggcacagagcaattgagagatgtgctccaggtcacagaggtcacaaacacccgtcaggccgcacatacctcaactcagaacatcagtcttcaatgcccagctgcgggtgtggctaaggggcctctcaaactgaaagtgtccgaaacgagatccgagatcctgacggtcccttgggatcgtctccacctcttctccccactccctgcctctgctgatggcagctccctcagttcaggtcaaagactctgggtgacctagaacccgctttctctcacacccacatccaatctatcagcaagtgctacaggttccacctttgcaataggcctgaatccacccactgccgactgcctccttggccgggcacccatcagggttcctgcacctctgcagctgccagctcactcaccggcttccaccttctgcctggcacctgccttcccagtctgttcccctctacacacggctggagtgccctgctgtcatgtccctcctctgtcaactccgtcgcactaagagaaaacccaagtccacccagtggccgcacccccagtagcttccctgacctcacccctcggtgtggcctgaacatgcccctatagtccctgcacaggcttcggcacatgctgttccctctgcctgaaactgtctctcctcagaagtccaagggcctcccacctccctccggtctccacacacacgtcacctgctccgtgaagacctccttgcccctccatttgaaattgcaccccccccagcagcaactgatctccacgtcccctcctggggtgattcttttggctagtattccatcagacatcctccctcttgcttgttagcctctgccttgggctgtgagccctgagccaggaggctcctgctctcccgcctggaagaacaggccatttgctgagtgaatatacctccccagagtcctgctgacgtcccagccctcctgtccagcttgtgtgtggccggccatggggtaggcaggtggggtgggcagggggagcttgcggagaggttggcagcatggtggctgccccagggctggcccaggaggccctcccttcccctggcttctttccatatgaattattaaggctcgtttatgatgggcccgcccaggcctgtggcttccgtgcataattcatggctctcccagaaggccctggcgctagagcagccacttcttccaggaagcaggaagaaagtgctgaggaagagtgacccagaactgggctgtcctccactctatctctgccaccctgtccctaaacaccagccacccagcacctgcacccacccctaccctcacccccatggagctctctcctgcacacttgggttctggttcccggagccagactccatgggctctgcgcaggctcactgactcccctgtctgtggcttgatttcccatctgtggactgacaaaactgagccaccctagtggttttcaaactgctccagcagcaagatcattcaccttttatttttccaacaaaatccaatgtggaaccctaatatgtaactggtgaggtagttataaatgtattttagaaggtagcgctgtaaaacatgactccgtattgagtaaataatcattataaacgttgaggctgttctgaagcatctggattcggggcccatgggggcctcagcagctcccaccacccagcactcagtttattcctgtgttttgcactctgctgagaaactcctaggatacggagacaggcaggcacacatggtaacagtcacttacagctcactatgcaggggtcgggggagaaccctttcctgaggccaggggtaaaaccagcaactgccctggtaactgaggctcaggggtcgccaaggtgccagcaccagttttcactgtttgataatttctcagaagtctagagctgggatatagcaatcagcgagaggcactaacaaacaagcccgggcctcccaggggcaaggcaaagggtccagaccaggggcacggggacaggaatccaggaggtggatccagggttctccaggaagcctggaaccacccaccccggccactgacacagactatgggcattttggggtctgcgacacctcctctccccagcacattccccaggtagtcaggcacgatgggaacagaagtcctgcccgggcccatttcacaaacgggtaagctgaggctcagcatgatcagccctcaggaggtgaacactgctgcagtccctgtgtgcccagccagtgctgaaatgggggagccacgcccaggcctcacctcagagagcacagtagggttgggacacctgtggaggtcaccaaatgggtcagggaggaacccaggagctacagccttctgttcctgccccacaccaggagctgaagctggactagaggtggcaggacagaccctgtccatgtgtcaccaaccattctggtcagattctgtgattcacacatccccatctcccctcctgcacatcctccccaccccccagcatgagtcaaatcctcgctaagccacaaatagctgtcctctgtatgagtcctcaacatggcctcctgccttgaagaagacagagaccccctcaaggtccccctcagagcaaaatcctctgtggaagctcacaggccccccgaggacatccatgtacagaggagaggccaagcgaagacagaactcaacccatcagggccagctttgttctctgggcttgtccttcctctacctggccaagtcacctctgccaggaagctttcctaggtttcccctaccctcttctcaaagccacagttctcaccacactttaccaagcctcatcttaggctggggctgcagcctagtcccatcatcaagcttcctacagagcttagcctggagcctggccaaaaagagttctggaaacacttggagataaatttaccagaacatcttccgcctaccagactggcctgccctgaccacctcactctgcagtagaagacaggctggaggacagggctgggaaaggggcccccatttcagcaggcagccaagcaccagggaaaggcaatgctgacgcggagggcctgcgtgctgggcactccatgtgatttccactgcagcgatggtacctcggccaggcgcaggccagttcatgcccacttcacggatgagcactctgaggcctgtggaaatggtgcaacttgcccgagaccacactgctgaaccacaatctgaacccagtcaactcagccatggccctgtcccctaggctgtcaggcctccttaacctcaagggggactccaatggccaaataggaagtaggttgcaggtaagagccgcccctcgtatacagccttttccaactttgagaagggggctacctcaggaactcactgcctccacaagcaagccaaagctgagtgcaatggggaagtccttccttataccctatcagggctatcctgcagtaggaacgttggccagcagggcagagccccagctccctccaatgcccccaccagggagcctgagccaggtatggggagaatgcccacttcctctgggatctgcttcttgctagtgcctggacccttagagtgcgccaagctgtatgtaaatggaatgtgagtgttcaacctgccttgacacgccatgaacctgttactctcgggtgctctgtggtgactcctttagcaaagcaaatcccctctgcaggctgtgagggatccacagctgcacaagcaaggggcttctagtgcagccccagctaccccacctttctagcctccccaatccgagagaagccaccttgcctggtgagcctcatgattggcttaaggagaggcaggtggctgaaccagcaggtcaaattactggcaaaatgctttgcaggtgcttccaactttctgtaaattcccaactagctcgctcactccccacctagtcactcactcactcattcattcattccgatagtaaccatgtacctactatgggcacctgggagggatttggcagcaagcagggcagatgcaggcctgtccttgggagcttggaatccaagcagaggaagctgatacctgatccggattggggcctgatgagaagaagagtccagcaagccttggggacaggatgcatgggatgcatgggatgcatgggaaggggcctgacctggcctagggactggccaggtgaaggtggcaccacagagcaggagggcaatccaaatggagggcacaacatatgcaaggcccagcagtgggctccacacacagtgatgccccgtgagcacccacagaccgaccgtgggcaccaaggcaggctgctcccacaccgaggcctgcagaattcctaccctcaagtacatgggagcacctccacacactggatggaagggcagtgagacggctgtgcccagggaagctgggcctctttaagtgggagctcagtctctcaggagctgatttcattcattcattcattcattcactccacagaaacaaaccagtacccatcacaactgggcccgggtgcagagcctcttccccccggcatcctgacactgccctgtactttgtatcttgcaatcttgaccccagggtgagggcagcagagagtactgaggctcagcacaacaaacattagaggctggggatattgttattacccaccccaccccccacacctcttcccccagctccatgggagctcccgcctgctgcagcccctctaccacccccctagcaagaagtgcccacaagtgcaaagctttcgccattttcctggtgttttttttttgtttgtttttgtttttgagacagagtctcgctctgttgcccaggctggagtgcagtgatgtgatctctgctcactgcaagctccgcccctcgggttcatgccattctccttcctcagcctcccgagtacctgggactacgggcgcccaccaccacacctggctaatttttttgtatttttagtagagatggggtttcaccctgtttgccaggatggtctcgatctcctgaccttgtgatccgcccacctcagcctcccaaagtgctgggattataggcatgagccaccgcgcacgtccttcctggtgttttctgacacagatattgtcactagaacatcatctcctgagaacagcacctgacaggcagaaggtgctcaaaaaatgctggctgaatgactggatgttccatccttacaactatgaaacataggaaatgtgatcccatcataaagatgaggtaactggggcacaaacaaggtcacatatggggttccctttataatccccagaaccaggctttctaccacacagcaggcatatgcatcagggcccacagctccagggccttctagatggccccatgaagtccccatccttcttcattgtagagtaatggcctcctccatatgccaccagtctggaaatcacctgtgaaacatacttccccccgcgctggctcaggaaccgtgtaaatcactaggcttaatggcctttgggattgttccccacaaccccctccccagctgttctgtgccagggaagatggggctatggggcgccagacaggcagggccatagtcatgaggtctgggcagcccaaggcatggtaagtgctaggaggcactgcccaggggagcagcagccccggaagcgcatcagaaagacagcggtggggctgccgggagcctccaaaactggggctggggctggggctggggctggggctggggctggatctatatgcaaggcaagcctctcccctactcaactcctgccccttacctcgtccccccatcaatggcttatccatggagaaagatgtgtccaggtgatctccccaggacctccacaccctgactggggaggcccagggccatgggaatggcaggggagcctgggggcctggagcaggatgtctcatggccccttggatgctgcttggagcaccaaccatgcatggtgttatttatttggcctcactcccatgtcttcttcactgtttatctcccccatggactgagtgtcccaagagcagggacccagttggcccttggagaccccagagcccactcagggcaacacacagctaaggtgtgggagtggattcaggtggggaagggatggtcaggaagcaggtcctgaaagatgggcaggctgtggagtgggcggcagggcagatggggcatgggcaaatgtctatgcagaggagcggtttggaaggagcggggcagacggctgggaagccaggtgatctccctgggacaagctgcagattttggcaactggctgcatgcacaggcatttgggttcagctggctcccatagataccatggttaggacattgctcagaaccaatatacaccatcccccaaccctgggagcctcagtgcccccttgctgggcagagggtgaggatcctgtgtttatcttcctatcccctaaggccacagttctgtaccttggctcaacttagggggaagagggggctctagaaaacatgctaatgcctggaccctgcctcccaccccattaaataatacaggtcagtgggtctctggacaccccctttacttccctccccagagcagcccttggtggcagcccctgggctgggaaaactccttgcaaaagccacaggaagatatgtgggagtggcctatgccctctggctccagcaaagccaggctctgtcccaggctgctgtgtaagaggctgctccattttccacagtcatgacgagcttggctctgtggacacctgcacagaccatgggctccctgttcagcacatatggattgagtacttggtgtatgctagctgggagctccagccaagggcaaccagccactgcccccacccctcccagccacatagtccctgagcagccaggcagcaaggtctatttcaggacaagaatagggaggacaggggcttgaagcaggctaggaggcctctgacccagacaaggaggtcagcgaaggtttcaggggacagtgactccaagccaagcaccgaaggacaggcagaggtcagtgggacaacaggtgggtcctgcctggggttggcagggccctcggcagcccatccaacctctccccagcttcctccatgctgagtgcttgcaggtgcttgttaagcccccatggaatgagatggcttctgttctgttgggcactcagttctgagggcagagatcccactctgtgcccctccccgtgcccatcagaagcagcctccttgctgaggtctccacaagcaccggttacaggaaaggacagaacagagatgacagttatgcagatgaggtggcagggggagcaccactgtcagctgcagaaggatccctttctatggagggtgctgagaacagtgaggacactgaggctcggaggaggacggcaggaggcttgcccagactatcacagtgaggctaaggcgggttaggaggagactggaagaggaagggccaaggggaggcccacagaccctactgtacaagcccctagggcttctgtggcctgcgccagccaaggtgtggcttaaacaattaaacatgctgcctccctcccctcaagttgctctgcccacgtactgctaggcacagcccagggggtgaggtgggcatggagtggggcggaaaaaggagagtgaaggatggagaggtgggagaattgagagtgagttcagactgccctgcctgactactctgtgagaacaggcgacagcaccaccagttccagcatgtgactgggagaaagccccagaaagagacccggatcaggggaggactatcagtcgggggactcacagccgtggcctgtagaggccagcttcttcctttccctgacccttggacagccccagagatccctctttcctcatgtgacaggtggggaacactggccagaggggtacccaatccagaagcaggacaaagcccagggcttaccccaagacctctgcccttggctgactggctcctggacactgtccagcccagacccaggattggtgcagggaacagagccagagagtaatgggaagggctaggttcctggccacagtggagcatggatctcatcatattcaccattgggtgctgaccaatgacacccagtcctctgcagtgagtaggcaaaagtatacccccactataggcaagtacaccccaccctgaagtcaccctccccgcaagatgagaatgaagtctcacaggcagcacccagccaagtctgggccttccccacggccatgtctatgcgttacgtccgtggctgtggccctctaaggccaggtcagctgcgctgtttcacagcagcaggacatgcccctctggccatcctcttagcccactcatgccagcactatcttcagacgtcatctgaacccgcaacttgctgttgtcctaaatagtctgcctaggccctgcctgagacaggacgtggcctgaatggcctccttcaggcctctgactgaccaaacctcactggcacagcacggcaacttgagggcagtggctgctcccccaaaccccaggtttgggtctagtctatgcctcaagtgctgagaggccgaaggaagtgtccctctccaggcctcggtttccccatctgtaccacacgggagttaaacgggaccaactggtcccacagttctcactgacccacatccatgacacaagtaagggtggggctgttctactgggagggggattgggagccaaaaatctcctacttctggtccttgggtggttccaaggaacctggaggcgccacaggccgagtgagaaataaaccctccaaggacgtcagcctggtcagtagggcagcctctgcagagggagatgcatggcagaacatcatgggagtgtagggacaccctgaaggtcctgtggctaggggttgcctggaggaggtgagatgcaggagggatgtgtgggacagggctgagtgcttggacccgagcactagggggaatcctgcccctgccacttgccatctgtgtgattttatcatttagcctggctaagcctcaatttttctcatctatgaaagtaggataaaaatggactgacctaacatgtgtgaaatataccaccgggggcccagcttgtagtgactgatgtggttaaaacaactacttcctttacaaacacttccttggcatggtcacccatccccttatctcctgcttcttccttggccccaactcccaccctcaagcctctcctctgaccctgcagccgacactgcttccccatcctccatcactccctgccttctgcagaatctccacctccagcccaaggtgaccccatcctcggctcaagggtaaatcctgattagccggaaccaatcacagtgtactgtttagattgccagtgattggttcagagtgggcatgtgactcagtgccagccaatgagatgtgagaggaagtcggctgggggcttctgggcaaggtttcctcccctcttaagagaaacccagaggagacatctcttccatgcctagtacctgggtctgcagatgatgcctggagctgtggcagccatcttgttgccatgcagtaagttggccaaggacagacagttacaccaaaagcgaggccaccaggctgagcacaggtgaccacttggtctttgccagcagccgcatcacacacctgttggctccctgtcaggggataaagggcccaccatgaggaaaacccaccacacatgataagcacagaagcagcctcttgttggcagccaaatgcgctcctcagactcagatcttgagggggtcgcagtcagctcaatgcctactcctcaagggccccatgacccggcacagagctggaggcggggcacgggtctggaggagggactcacaaagggcagggagccggaggagggtgttggtcaggaaggctcctgccccagggccctgggcgaagccagcagcctggagagggacacggtgagcagtgagcgaaagccagaggtgcggaggccagagctcttcccaggaccttcaagtgtcccagatagtcccagggccggaggctggagtcagcccaggcaaggcctcaggggctagccagggaagtggggctctgcccatggcaggtttctggggtgcaaggtcccagctagcccaaaagggagacactccagcaagcctggcggggggtccaaggagagatacaaagactcccagggccctaacacacccaccacggactcagctcacagagagaaaggagaaatgcccatttgcaagggcccttagcacagaggcctgctctgccagctccttctcttttctcataactgaagtgggggcagggcgggggtgggttgtttagttgtttgtttgctggaactggtggcagcaccagacctgacctttaaggcttcaaatgcagcgttttaggcggggccagcaggaggagaacacgggctgtggaaggaagtgatcaagactgaaatgccacgtcaggctggaaactcgaggcagagcatgggcctctaccatctcaggaatacgccagcccctccaagcccacactgcctggtgacaaagttgtccttcccaaggggacccagaaagcttttatgtctctgaaacagcacagggacatcagagtttgccccacagaaacccaaggagttggggcctcacaccacatagacatcttgcccttcgagtttgccaaagcagacctcaacttgccccccgacccatgccatagattttatttatttattatttatttatttataaatgacaggctctcactctgtgtccaggctggagtccaatggcaccatcacagctccctatagcctcaacttcctgggctcaagccatcctcccacctcaacctcctgagtagctgagaccacaggtgtacactactacacctggctaatttttgtatttttttgtagagatggggttttgccatgttgcccaggctgatcttcaactcctgggctcaagtgatcctcccacctcggcctcctaaagtgctgggagtacaggcgtcagccactgcacccggctggatatttttatttaagagaaacagctgtacatcagtgcgaggaaggctgcatagggagtcgccctccccgcagtctgtactgagcattagggatgagggctgggccctgcccacagagtatgtgcagccacagatatgtggggcttgaaggttcccttcccccatcttgggcctcagtttccgtgtctatatgatggtggtatcaggacctcagggatttctgtggctgtggcatgtcctttccaagtcagggacgcatgcaaagcccataatgcccaaggagacggttgcacccaggctccctgcccccacaggaacccctcctggcctgtaggctcctgagcccctcacagccacttcccaaaatcccaagggccctgggccatcgcagcactgacaacacacaggcgcgtcctgaaaatgccaggaaagcaaaactctcagacaacagaacccacgagaactgggtccacacagctactggggccagggcccatcacagggcatcactggacagccttatttatgaagactcagtagacaaaaatccatccttgaaggaagtgtcttcgctggagatgctccagatggagaacatgtggaggaatcatccctccagatcatcaagggatcatcaagccaaagtttttacagcccaaatcgtgcccacagtgtcttgctgcggggaggacccaaacccacagcagatactcaagggctgccagtctcctgcccttcagtgtgcaaatgagaagcacccactctgaaagggaaaagtgccagcccaaggtcacacagcaagagcttcccactctgcctgagcccaggctccacgcccaccctccagattttccacgcggggaagggctgtttgcaaagatgcttcacttcacaaaggactcacggagctcctctgagtcccaagtcctccactgaatgtaaataccattcaatttgcaaaaatttgaattacaaggacgcagcctctgtttcctttgcagactgtcatcacgccagttggtagaagatcaaactttccagctcagctttaactcaggctgtttctaacataaaagtttgcaaaacactggccctaacaatcaggatgctttatttcccactgccagtgtttgcccagccgagccctggcattaacctcaaaggcaggtggtgaaggtgggcactaggagcccattctggctgcagagataaaccacacgtgtgcttgcactacataggctcccaagcacatgcccgcatttgacttcatatgcacatacacgcacacacctactgctgcctacacacgagaatgcccatgcacacacatctacacacatgcatccatgtgtgagtacaaacacacgcacacaagtgggtatacgcacaagcatgcttagatgtgaacacgtctgacacatgcacacatacatgaacacacaggtgtagacacgcccacatacaagctgacatgtgcacacaggcaaaggcaagagccaaacacaagaggaaagactcacaaaccacaagtgggtcccaagtgcctgtagggcctggatgggtgctgggtgctatggatgaggggatagtggctggcacttggagtgcaggcccagctagactgcaaataccccctagatccagtcgggatccacatgcccttatcacagactccctggggccaggcccatccctcacagtctatcacaccccaaccctatgtggcagtacagccacggaagccctgttttacagatgaggctccaagaccctgagaggctgtggaagttcccaaggtcacacagctgttgagaggtgtggcagagtctcagtgcacacgaagagggggcttgttcagaaagaactagccatcagggaaggcaggcatcaaaggggaagaaaggggcccagggtctaagaggggcagggaaaagacaggcagaaggagtgacttctcagccttttcacccacctcttcccctttgttgaatgaggatcatttccaaggtgggaaagatggatactgatcagcaggaaaggcttcccatgcccctccccctctgctaaacaattaggctgatcagaactcaaagggggtcaatctgaaaagcagccatgagacacccaaggtatggccaaaggaggacgggaggtccaggcaccctcacactggaagagacaaggcccagcggccacagctaaagcagggcgtggagaggagcaggaagaccccagatctgtcttcttagggcattggaatgtcagagttggaaggatcctggaagaaaggaaactgaggcccagggggaggaggggttttgtccaaggtcaccaagcaagctacccaactgagaagattaggctgggcttgcccttgacagaggcctcctcacctaagatgggggctttcagaactcctttgtgaatattctccccacctaatcccagctagacagtctcctggtttgtgaggctctcccctcaccaggctcagtcacgggtaacagtgatggctggggacccagcaggtccagaccagatgcagaaggaaaagcactgtgagggcccaggtgagaggagcgggaccaggaccggggacaccaagccaacagcctgagtctcacagtggcagggcagggcttggctgagtctgccccttaggtcctgaccttatgtagatttgaatgacagaatcttgactcctttagggaggccccaagagacccctgtggggacctgcaagccagcagggccatctcaatctctgtggtcacctgcactggccccccttctgcccttagccacaggcagctctggaagctcttcaggttccacaggacaagagaagaagggaagcaaaaaaaagcaaaaaccacacacacacttcccttggggaatacgaatattgattctgtagcttcttgtttagacagtaggcaccagaagaagaagaaaagaaaaaaaaacctgacatgaagagaatcttcccagttggctggagggctgtagccagcaatgggaaagcccctcatgtcctccccagcatgtcctccccaggcctgaggcccacagcccagtcacttaaagacacaaggcaccaggtctggaggcaaatctccgcacgggagtggggtaggtggctggaagggggaagagagagaaagaccactcctatcttacaggcaacatcgccctgccagacagagctcagcccacctgccttgactcccaaacctccagctgccccttggagagttccctagcaacaagcccttgaacgctggttcccaaaccccccaagtcccacccatccggatggcatgaggctcccccagcatctataagatcctagccctgtgaagtcccctcagacctggcaaaactgccaagggactaaaggagccagcctcaggtttccatgaacaacccccagccccacccccacctccatgacctttctctccggaatcagactggaatctggagaaggaaatggcatctcatctccagatgaagcccctcctctcctccacccctccacacagagcaggcctggcccataactcaaagctgggggaaggaaagctctgggctgggggtgctccatgatggcctgtgtatacgtgggaggtagatggaggtcagcactggggctataagcactggggctggcaaggcagcttcatgccaaggaaggcccctcagggttgcctgagacccagaggaggaaagagagacagacagggcaaagttacagctggaagtcccaggcccagctctcatatcctaggcctcttcattttcttcccagagattcaggcttcaagcccccctccacttcctgggcccactgcccagatgtccccagccctctggctgggcagccaagtgtctgacagatctatcctttcccctgccctgcctctcatggttgtgggctttaagcaggtcccttcatttttctgaggtcagtctccccatctggaggatggacatgaccacgggctctgaggtcaaggcactaatgtgggtgaggggtctggcctgggctcagtaagggagatcaccattagcctggagacgtcccccaccacagtcaagctgtgttgcagggagtgagggagggaggtggcccaatgtcttcctcaaggaggtagaatctgatgtgggtgggcacagcctgagagagtggcacagcccagagctgggatgggaaggcctctggaaggttcgggtgtgagaccttgaaggaggggatctaaacctgagaaaagagcacagtcatggcagggcagcatgagcaaagtagagagacaggcggccacctagcccgtgggagccctggagactggtgggtctcgcagtaagactggctaccgcccggctgcaacatctgggcttaatgctaatgttaacagtggcagccatggcacctgacggagccctccctgcccactagaggcggcatcctctcccgttaattctcaccaccagcctcttaagcagattctatcatttcaattgtggaaactaaggcaaggtcatcccaatggagcctgcaaagtctacacctgacacccagcatgtccccaaactacatcctcccaggagctggcagtgtccacccatacacatctgagatgccaggagctggcagtgcccacctgcacacaggcaggaggagaaggggatactttctgcagaagtccacttagaggccagctttactctggagtcagtctctccatggggacatgagtgtgacaaagaatctggagtgagattcacctgcagactacgaggggactcatcctaaaatgagtttcctcctttctcaggggttaacctggcacagctgaccaaaaggaggtgcctgataaagatggagtccaggggaacagcagccaagggtccccccaaagtcctccacaccaggagggctgtgagcacctggcagctctgcatctcggtgacagcagcagcggctgggaagcctcatccctccctcctgcaaaagctgaggcaggtttttgggaagatgggggacccagatgagtgatgctgcctccctccaacagggagagccacagggagatggagacaggggctggaaggcccagacagacacacgtcacccaccattaaccgtagctacactgacgcatgccctgttgtaggcactgctccccatgtgtccactcaggagaggagcacgtactctggttgtcattaatctgctggtggtccaaacccctcaggcccctcactgcttctgcccaccctcagaggaagggagacgctggccaacaccatcgctggagcagagctgggctaagagggtgcagtcaggtgggccagctcagccgggtgctccacccagcactcagccaggactccacagaggaggggacagagaaacctgggggcactggagaacagggcacagaggcccagcagagaggacaaaagaggcgggcagggaaggataggtacagctcgatgaaagacctgaagaagggggacaggggaagagggagggaaagacacaaggggaggcaaagcagtgagggctgcccctcagccggcggtggtggcctgatgctggggagggcataactggaaaaaggaggcaggtgaaaggtgtgctcggactcaggtcccccacacccagccggacaagtgcacatacatgtgcatacatgtgtgcaaacatgtagcctcctccttgtttgaaactctgatccaggtccaggtaaggtgagacagcccaacccccccaccccccgcccaaaaaaaaaccctgaagccctgtcctcccttcagcagtaacccctctgcccttctcaatccagcagcagccttggtccattttgcctggtgggcagagagccatgctgccagagcgattgcagaaatcatagctagcagaccccaaacccacacttgcttaaaatccagcagcttgtgaagctgggcccctgtgcactggcagacactaatgagaaaatgacttgctcatcaggggccttccccactgaggggttgtcactccagtgccatgaagctgggttccactctcctccttggaaatccacctgtatcaaagtgtcatcccagcctggccacactgacccagcagaaggttctgggaggtcacccatccctgagcagccccacagaaccttctggcccgaacaacagcctaaacctttcttaccagttcaacaaaagcaccaattccactggccatggtcatgtgtgggccccttcctccctccaaggatcaatgtgcatcctcgtctgcgggaccagggcagctgaagggcactggctgtcacagcaaaccctctgtgttgttgtaccattagtcacctccccctggaccctcagagcggcacagcccccaccccacccccaccctcattctctaattacagtttgcaagacatgtcccaaacccccaaattagctccaactatatcgacaacagcgtccagctggaagtgtgtcgctgccgtcacacccgcctcgccatcttctggctggggacagagggataggtgcctactctggtcaggttctcacatcggccttctagaggagactcgtgcaggcccagaagccatctgaccaactgcacgttgcagggaaagggagtgaggtcgggagaggtggaaagagacatccacttaaaccttcactcaaggagctatgaaacggctaagaaaaaaataattgtggcttggctcgtgcttggctttgaggaagaaagaacaacaaaaaaataatgcttttgctttttttaagcactatgattgaagtccatttccatcacggcaaatgaaagacaataacgcatccaccagccctgaacttccattcgattcttttctccctgggcaacccccaaacacacatgtgaaaaatccagacggttgacagaggacacgtccgtgcggcacttgtaatttgccaactgatcacctgcctgagcacagccaggctgtgcaatgagagagacgacaagacggagagagagacccagagaggcggttttcctgagtttgtttttccctcatcttagagagcctacgaactggagtcggcaggttttgtggcagaaccaggggctcttacccttgggcagagctggtttaaatgacgcagagccagcctctccctttccccgaggccagacccttccccttggccaccagcagcccgacgactcatgccccagtctccaggccaggacactggtgaaggagtccagggacaggtggctcctcagacccggagacagataacagaagcaaggtggtcaccgtgccccaaagggggtctgggcactgacatagggctgaagcacagtgtcaggaaactgatacgtcctaaaggccacatgcactgaacatccactcccagccccagacacatctggctaagctcacccgtaggaggcagcccgagtttgctggctcttggggaggaggagaaggctcagaaggaccaaaaaacctgcggaggctggcagagccaggagaagctattactctgttggcagcagcagcaggcgcaggcaggggtccttcccaccattcaccttctgcccggaccccaacgccttcacctcccaactgggctctccagggtactctctcctcaggtggaggggggccaagaacaggggacactgcctctgtggcactggccacagcaagaaggtgctcgcatcatcagcatacagctccccactaaaggaaaaggcccttgaaggcaggtgtggagatgtccctcacctctggctgtaaagcgccggattcccaccagggagggaacgtggggcagatgcgcggctccaactccgccggacaggggtcgctggccgcccctctcacccaacccgggtttccctctcaccgggtcagcggcaggggaatcagctgacaagctcggaccgcccccccccaactcctcccggggcttgaagatcttgccttgcctcattcgggggatttgggggaagcaggggcaccgcggggaagtttcgcgacgcagccagagcgccgggaccgcggctgccagccttcggggcttggggccgtcgcccccgggcgcagcgggcagccggacccagcgcctctgccctggcgcggagcgcagggaaggagtagcgcggaccgggggcagagcggggcgcaaggctcggccggggtctcgcggccggccgaggccacttacgtgtgctgctgggggaagctgtaggcagaggcgccgggggcggcgagcagcggtagaagcggcagcagcagccacagcgggcgcgggggcccggacgtcgggcgccgggtgccggggccagggtgggggccgcagccgggccaggggcgcgcagtccgcgctgggccgggccgagaggcgccgcaggtccgagccggcaccgccatgtttccattcaagatgcggcgccgcggggagggggggcagtggcggcggcggcggcggcggcggggttgggggggcgcgggcggcgggcggtaactcggcctctcctccgccgccgccttctccgcgaggggcctccggggctgcacgggccgcagcgcctctgcgggctgcgcgctgctatctccctgcagcgctggctccaagcgctctgagcgcccggcccgggacctgcgctcaaatagcagccgccgccaacctgccggcaccgccctcttctctccctccctccctctctcttcccgggctggcccgcccccgcgcgcccccgccgcggccacgcgcccacccgtgcccgcgcgcctctcgtccccgcgcagcccgaatcctgccctactggctcgggcgtcctgcgccccagctgctacccgagcgccccgggtgcgcccccgcccccacacctcagaccctgccgctcctccccaccccacccgcgggaagagtcccgggccccgcggcccaaggcaggagcatatgtgacccttttgggggctcgaccttcaacaggcttaaggcctagagtcacaggtttaatggtggagtgacagcttcagcggagaccagaaaaggaggcatgctgaacttacagcccccgtggctctagctatctttaagatttctctctgtcgggggcttgcacgcccggctgctggcagaaagggcctggacctcctggttccctaagcggaaacctgggcacggctgtacggttgtggggggctggggacggcaggatgcagccctctgcagccactcgcttcgcttccctgggctgaacaggcactgtgtgcaggcctgtcccaagccccagttcccggagtttgcacagcctctgtttagattcttccagagccaggaagctcatctctgcacaacccagtcctttctgtcctggaggcccctggctcttccctgctgtgggcagaagactggggctggtgtcaaccttgactccacagcttgtggccctttcagagcctcagtgtcctcgcttgtgaatgcttgtgtgggtgcccactcccatttccaggatgaagtgagaatggggagaatctcttggtaaactgaagcattcacaatgaggggagaccatccctaggattctactgaagttaccctggaacccagctctgcctctggtgcagataggatgagagaatgctccccaccaacttgacacagggcaggaccccctcagcaataactgcccacagacctggcctatcacgaggaatgagggatagtaaccagctgggcaggatggttcggaaatgtccagatgccccacctcatggtatcagtggctctcctatcacccactcacaagtcagcccaaggagggcttgcagttgaaagggaatagtagcccctggactgaaaagggtaggggtaggggctggaaatagggcctaggacagccttcccttgctgcctagtcctgccttggcttctccaatcccagcaaaccagggcttgacag

SEQ ID NO: 78 - DNA, 954891 bp, Homo sapiens
  source 1..954891: mol_type = genomic DNA
ccctggttgcagaaaggcatgcaaatatgaacccaggtgtctggtgcgccgggagccccggcgacgttaggagcgcactccttgctggggtcaccggagttgcgcttggccgggcaaggatgactcagcctcactccggtcggtctttaccgccagcctgcgcgagggctccacaaagttcccaatcacaccccatacctcgcacgggggagaggggttctgcaagctgggtcccggggtgggggcagcggcgagagaggcggggagaagcctggttcccagaacgcgcaggggcttctccggcttcctttctcctcgcccctgagggcggcgagaaggcgcctcctccggcgctcactgcctcctgcccagtgcggtgggcgccggagtggggagcaggcaatcccccaggctcggagaaatcttttatcccgaaatccagggtgtcccccggtcaggatcgactcggcgccgcgttggcttcctcgctcaaccctgacatcccggtccccaccagtcaccgcagccgggcggactccgaaggcagcggccgctggggagccccggggcctgggtcgggcgcgcagggggccgctgcgctgcggccggatgccgggagccccgcgctggtgcgcccaagccgtggtggcagcaccgccctccgtgctttcccctgtcgggcgccgcggccggaggagcagctgcgggcggtcacgcagcgctgccctagccagagccccgagctcccacccagtcccatccccagcccgatccgccccgcgtgcgatcccgcctgccgccgcgagcctgtgctcctttctgagatttctgcttcttccccagctccctccccgcaggagaatcgcgcggcgggggcggagggcgcgccccctttaggttccgcggcccccgaccccgcccggcccaggggcggagcgggcatgctacgccctctcctagcagccgcccgcaaagtgcggagcgccgcgccctgccctcggcttccctcccgcgcccccaacccccaccctggctagggtcgcccggcccggggccagccccagagtcgcgcccgcggtggcggactgcggagttgtaaagaactcagcggccgcagtagcccgggtggggcagggcgcgctccgccgcggccaaggacactggagtttccgagtccccgcccgcgcggcgcctcctgccccgccgccctcccgccgcggcccgccggactccccggggccgccgaggcggggccgggcggctgctgctgctagaggcgcgtctcgctgcctcctcccccgcccgcctccctccccacctctcctccctccctccccacctctcctccctccctctcctctccgccctccccgccccccccacccgctcctttttctgctccccaagtgagccgggcgcgcgagaggcaggcggggcggcgcggagcggagcaggcagccccgcgcgctcgcccaccgcccgctccgcgcagctccccgcggccgctctcgtcgccgccgcagcgggcgcgtcggagggagcccagcatggccgggccgggctcgccgcgccgcgcgtcccggggggcctcggcgcttctcgctgccgcgcttctctacgccgcgctgggggacgtggtgcgctcggagcagcagataccgctctccgtgtaagtgccggctcctgcgccgcccggggaggggaccttgccgcctgcgacccactgtgcccaagtttgggcgcctgcaggtgcggctgggcaggacccgccgcgggcgtcggcctcgccgctcgcacctgcctttcgggacccgcgtcgggcggcgaggccggggtgggatgctctggcccctgcccgcaggttgccgagtgagatctggagaggctcacctcaagtgacggcaccaactttggagcctggttaccgaatccaacttccatgggccgctgaatttcccccctctttgctctactgccgccccacttctttttttgggggggggatgggtggatttcttctgactgctatttgccaggtgatgcccagtttggggggtcgagtcctcgggcagtggttcgaatgaaactcagtggtctttttagagagcctgggagactttgcgcattcttaactccgcgacccccctcgggccccctcccgcgctgcgctttgcagttttggtgctggcagtttctaccaagccgctttttctatcttttcttcttttaaaacatgttacatcgcactgctccttcagccatagtcccatgtgtgcgtgtgcgtgtgcgtgcgtgttgactgtgacacgggtgttacatatcttcctgtgccccttctccctgtagggtgaagctctgggcctcggcttttggtggggagataaaatccattgctgctaagtactccggttcccagcttctgcaaaaggtaaggtttctgtggtggcaggaagcgatgatttttccggcacagaaaatggaggcagatttagttttccaaacaaacgtgagccccgagcagcatcagttatcggaggactctctgatccccgggtttcttggcattgtactatgcagtgacttcttcctaccaaccggttatttttagatgacacttgattctaaccacaaagaaaagcaggatactcactcgcactgtcctggctggggctcggaaactgagtgtttttgcatggctctcgtctccgtgtcggtattgctgtttcagtgccagagcagatgctcctcgggccaaaaaatgctaacttcatccaaggggcagactcagtgcctattttgtgatgcctttcaccttgcgttggaggcgtggggttcagtgtatcagagaaagacgctgcactattgtttgtcatccctgcagttgtacaatcccattattccccaatcatctagacccagggctaggatgcattacatcattgcagataaggagaatgaatgtggttatctttccactcagctgcactgccgggtaataacctatgagagtagtccacaaacttaagaaatgggtctgcatccatgtaattctggagagtaatgagaatggagaattgattattaggttcttatcacaagctgcatcaattttaattcaaataggcagcattttaagcataagcttaaaattacattgtgagataaatggtccttcgttctccccttcaggaaataaagaaaaaaaaatgggtctgggaggagagattagaggggttcaaagaatttcaagttagcagatcaacaggattaatcaaagtattctcttgatgatagaaaataaaattggcctttagggaataattctctgaaaatgggtacaaacagcttaaattgttaagttaacttttaaacattttaaaatatgatttttgggccaatgtaccatatgtgttatgcatgctgcctggtaaccaagtacgtattttatttatggcattccccttcagagagtagcatttttggggacagtatatgaaacagtttgccacatgaaatccaaatatcgtaataaagcgttggcccaccatggaatgacaaaagttattatggtttaaaaatcgccaatagccttattcattgaaaccttattcattgaaagattgcttgctcaactctgttgtttgggaaggtgttcttgaattataggcagttggtaaacagttgaggctacgaaatgccctcgtggaagatgagaatttacatacctgtggcccacctcggcacttaaaggaattgcataggaattgcctctttccctagtattcttttaatctggaccaatctgtctcctgctttggcattttgcccacttgtcagatgtttgatgtgatgaattctggactgtagcattgcctttatatttttcttatgcttttaaagaagataacattttgtataactttaaagaagtatttctcatctgcacgttgtagttgtagcaactctaaaagaatcccttcagagcctgttaatattttttggttgtgctttcatatcttttatcccacattttctaggaacacattaaatatgtttttttctttctctttgaagttacacacacacacacacacacacacacacacactgcacaaaactccgtcaaccttattatttgctactctataacagcaaattggaaaaggctgaaatgcttctcttaccttctcatcagcatcctttctgatattgaattcactagctttgctttgcttttgtcatgtttgcagcttgacaattgtgtaattatttccagctgtttatggctttgttatcatttcttgctgctgcctggcattttgtaatctgatgcgagggaaaggtgaggtgttgcttggcattgcgttccagggtgggtgtccaccctagtccttggtttggaatcgtctgctctgggggtcctgaaatactcacggctttgggttacttggcagagactttcataagtggtgggggagcatgttagacaacttggggagcatttttcagctatgttttggctgttttggtccactatccccgcaaatgcttttgtatttttaaaattagcaaagaacattggtttagagagttcagagtatgaatgggagtagatctgagtgctcagagtgtaggagacataacatcatttggaaaaacaagtggataattgcttctcttttgctaattttcaagtttctgtccatttgcatgaggaattactcctctaagtcagagctctgtgcaccctgccatcatatcactgtgtccttaacaattaagatgctttcaaaatgagttagaaaatttggctggaaaatgcattaacactgtattaaggggactcaaagatgacaatactatgttgtataatagagtgtaattgctctttttaaggcatggatttttaaacttgattttcagttaagtaaggtgtgctgtataccaccatataattttatgtattttatgtagtttcactaattgacacttcatgttgtgaatcaatatagtgtgttcatttttagaatggaagtttagtcatttttgcactaaaacatacactttacaaagtagttattatgaatataagttaaataataattggccatgcatctattttaaggtgtttagtgactgggaaaactgccattttggtaacatgtttttattaggtgatataatttgaggtagcagtattgttactgacttcatcaatgtaaacacaaacatttagcaatgtaccttgttatggcttcagaaataagagtattttatcagttgtttctatgtttaataccatgggttttgccgctttagcctattataatatattaggtattcaatgccagatagcccctatatttttttcttctgtctttactgagcacaggaatagcaacctgttaggtccttagaaataggatagttttgattttataaaacgcagtaagccatcttttaggaaatttgtctgttttcagtacagaatggaagattgtgggacttgtctgtgggcgctggagttcatcttgaggggttttagatgctgtgagagaatagcaggcccctggagggatggtgctggtgcgccgctgtatgcctgtgtgctgccttgctaagctggcagatactgcaggggtttccgttcacttcaacttttaattaagtttctgatttgatatatccatgccagtcagtattcagctgcctttatcttgcttcattttccccgaagaatggactttgtttggttcttttggggaggcatagtttcattaccgctgtattttgggattcagtgagaagcattctagtaggtccgggaacctaggctgttaaactcagtctccacacctctaacaatcacaatcaaaggcattaaactggctgattctcatttcatcctcctcagggagaattggataggagctgggtttttcattctatttagacctgcattcggggaaccaatgttcacgggaatgaagggttccagttacattttccagaatcatgatgataaatacacaacggaaatacaggtaatgtgtgtctctgccagtaacgctggaacagaattgacatttaccttggacgcctcatggagcacttaccaaacacgcacatcttggaatgcacaatctgttttttacattatcaactatttattgagagggcagccttaatatataaagttgatatctctttccacaggacagagtcagcaaagtaaaaggttggtgctttaagccatttttataattatgacttttcatcaatgtgaaaatcggtggacttttaaataactgaataggtgtattcacttatcaggaattaggtagcagtgccttgctgctcgtgggaagcccagcactcttcagattgctcttgtgggggaggcgctgttttgctaacattttgtgttgaataaacacagttatttgccatcctgaatgataaatgcgttcaacctatgctgcggatgctttaattcatagcattactttaaatactggacttttccttagcaggttatttttaaaagcttgaaatctctgaagtgacagtttttaatcattcagggcagtttattggtctcattaacacaatcacccagacagtagcagagcagggcaaaccaatgagcattcagtttgtgcctcttatgcatatagctcattgcacttgtagagttactcatgaccacttgctaactttcggtctgagccttttttgctcattttttttttcttttcctttaacttgttttttttctccttaaaatttcttttctgccagatacatttctactttgccttttctcccattaggaactgctgcggcctgtgttgctcaggagaccaacagatgctactcaaaattaagggaaaatgaaaatataggcatggttttctggttggaggcaaacttcaaatttttaattcccatgtggttataattttgattgattagcatggtgatcgcatgctgattttaattaattaattctaacactactgcaatttttaggcaaacacatgaataccaaaccacctgataattctgaaatccattgggcctgagctgacacagttattatttccagtttttgatgaagacatagccatatgtcagcatgagcaaaagtaaaagaaatgcgaaaccatcacacccggcacctgtggccctcccaggtgtttcatttccctaaagtttgaagcacatattcttggaggtgcaggtttgggattctagccttcatcagccttggatttatctccacttggtgtttagggttcccacttacattgatcaatccatggtttggtgtgttgggcctacctaaagaagtgtacattttcacgaaggagcctgtatttcaggcctgtcacaaatcctgatttaccatcatagatgctatgatgccaacaaacgggctttttcttcaccccagcacatctcctctgtcagacatgagcagcagctacttcaggggtccctccatcttttgtagtcacagtgcttgttggcacagtctttgggttgagaccacagcatcttctacacaggcaatgttagcagattgtgtgttccctgggacactgtgatttgacttagaggtttgctgtggccaaaactgagaaaaaaataaaacagatgttataaaatgccaacctatgaattagcatatgtgatttttttcccctttaaatgtaatttttatacaagagacataacggcctaggtttcatctcgagtgactgcagtgaagcttttgtgtatcattcagtgaaaggaaaagttcctaatgtcaggcttctggtaaaactgacagaatccttatcagccctctttggtccattaaacaaaattttgcttctcctttacaggaagaaaatgatatgaggaagaggaggatgcttgattttttgtgattttcctaaatatttagtgaccaacagactctgtctgaagtggttgttctataatgtaaaaccagactctaagccccttcgacagcccagtactttggcctgtacttacagctcacccttggcagattaggtatttgtatagctgatgtgttttaggggatttctgtgtgcatagccagcacgtctacttttcagaagggaattattttttacaaatacatacttgaaaatagtccagttcatttctaataaatggtaaacatttcaacttccatttgctttgaacaacactcattgggtgctcattccaaggctgtttaaggcactaaatttataacatgtattaaatttatatgttgcatagcttcccagttaccccaaatcaacattatgaaaataaacaactcagaaaccaaactattggcgcacatttcaaggccatattggaaaggaaagcattatcttttcacaagaaatggatggctgttccttcactttgtgcacttcagagtatttatcttggcacctgttaatggaaaacagtaccctcccaaggttaaaaggactgttatgcatgtaaatgatctggacaggcaaggtgggtaaggctataaatgctgtgggttcacaaaacagacctcgagttttccattttaggtgaaacaactgccagttgatatttggggcctgcacatgccattaccgtaatacttattaagtgtgtgtatgtgtgcgtgcctgtgccaataaaaatggatgctgctcatcacagaacgtgccagataatgcttgctgatggggaagactgttcttgtcctcttggatgttagagaggctgacttgagagaatgaaccagggcagtaggacagaactgagtcacgccagtccaacaggcatggatttgttcagcgtctggaattttgtaggcagttgaatctgaggacttgctgagatcagaactggctatgtaatttgtggtcctcagtgcaaaatgcagaatcccttgttaaaaaattattaagaattccaggatgtggcagcagagcctcagaccaactgcggggccctggctaagcctcctgtgggacaggctgtcctcgttttggctttctctctttcctgctggatagcttaccctctcagctccattcagtctaggaggcttcctttgcccacctttgttccatctccaatgaaatcattttcttattttatgagtaacaggtcaagagcttggagcattttcaaagattcacatctttggagatgctgtgttgttaaaggaagggtcattggccttaagcagtggcatctctctttttatcttttctgtgtgcatttccaccgtggccctgggcaaattgcttaatctaatagtaaaaacaggtaacgctcaatgctgtagtttctgcattccaggtactgtgataagccctttacttatgacatcccattaaattctcccagcaacctaatgaggtagggactaccattcaccccattttacagattgcgaagctgaggctggcagaactgaagcagcctccccaaggtgactgagcagggtctacacatctggccacagtgctatattttcttgtctttgcgtgatcctttctgaccttagttcctatttgaaaagaatgtgcataatacctgaattttcgatctcacaggtgtttgggaggattaaatgagaaacatctgggatattaattcagaaacaattaaagcctgggttaacagctgagagggcatagccttggagtcagatgggcttggatttgagtcccagatctgacatttcctcttcagcgttgccttgtagtttaacatttctgaacctatacccttaaatgagaaaggagaccagtaccttctatcttataggctgtgatgaaggttaaatgaaataaaatatgcaaagcacttagcactgtgcctggcacattggctcctgccagtgagttgttgttgtcattcctagttgcaatatacaaatacaagctcttcaggtaatcttcattgagcttctgtggggcctggctgcatacatacatgtgtacttggtgaatgagcaagtgcatgaatgggtgagtgccaggcattggcatgtaggcagatgatccccagctgacccctgatgagagcacttcagagcaggaggaaggctgcagtggcggcggcctctgtcaagatatgcacccttcccctagagatcagctcccttctccctgagcatggggggagatgcccagagaagcccatcacccaaggaattggggttgccacatctgccccacagcccagagtgaggtccttatgccacaggagatcccagcatacccagccatttcccttgctgtgggagcttgttcagaagccagctgcagataacctctaatcccgatgcccccttgggcagcatttcagttgtttaggacgatatgtggcacctgggaagccttggttctcaggccatcctctcacttatactgtcccacttcattattcatgaacaagagagacttggaatttttgtcactttgatcccataattagttcataaaattaaggcagtgtatgttatgcacatttagtgtggcaggggcacaatgacaaatgcatttattatgtccctagggaggtggatttttttttttgctttctttccaaaatcctcctaatcttgtcctttgcacagcagaagtgggcagctgtaagactaaaatttgctgttgctgtaacattgtgctataatttgcgaagcaaggtgaaagttggaaatatagggcaggtgtttgactctttgtacatgtgccatccataacgccttttccattgtattgtttgaggcagaggtggaacaatattgtaaaaagaacaatagatgtgggagacagtaaatttactggattcaggtaatctacagtcgcgagtcataacatccagctttacgctcagcctcctactggttttcattattagtgaaatgtctgttagtgcaatatgactgcgtcatgtacaaacagctcaatgggcataggcttttgccccactgacataataatagtcatttgacttctggaatgctaatgctacgtttggatattctttcctcttgactttggcctaggtccctgttggaatgctattgtcatttgcttttataatacgaaattcgcacaccaactcagacaacacacttcagacaaatcattatctggcaaccaataaagggtgtttgtgtgcgggtgtatgtgttttatatacatgggttgttttcctttgttagtaaatactggtaactaatttaaaattccagagtgtgtggccaagttcgagtatttcagaacatcaggagccacctggtcgccctgaagtaagatgtaatcctctcaggagagggctcacagctcactaatcttttgaaaaagtcaacagtatacatttcctggaacgggaatttcagaattatagagccatagctggattttctacttgaacagcgaggttttcagtttttttgcttgaaacaaatgctttatgaatgataggaaaaaaatatgtatacttagaaagaaatcagaggattgacttttaaaaatctacttttaagagaggtggctggtcttgggaaggcagaactgtgtagagttgagagtctgaatctgagtgacgacaatctgggtttgaatcgagatgctactgctgactggtcatatgaccctgacaagtcagttgctgagcctcagtgttcgcacctctcaaatgggcacaatggtactaacttctagggtgagttgagaggcccaaatgagaagatgcatgcaggatgcttggcaataagtgactcatgggaagtgtatagaaaaggtagactgttgtcattgttattattattctcaaggagttgcttctacataccagcaagtgttggttgctaaagacagtagtttgtccacttgaggggttgttaatgccaagccacctggaggccttgttttgagacctccatcaaagttgcctacaactcagctctacaaggggttttcggcagtaataataataatgatgcaggcgttttttgtattttatgatgtgtgctttatttatgatatatcatttaatttctcatagcaacccctgaggtcagatctattatcatctgcatcagttttagagatgcagaaacgtctttaacatctgagacagaggatgtaactttgccccaggctacatggctccacgtggcaaaggcagactctgagtccgcatcatgtgaatcccagttcaggtgcttgagctgttgtcaggtcagaggaaaggcatttgggggatttctaggaccaaccatttatcctttgcattggtgttagtgtggtattggctcatcagagcgtttggtggaaacttctccacacccttaaaattgtccccggtggaattcttagtcttgttgcttgggcattgtcatttgctttcataatgcggaacataaaggggtaagagctggaataagaggagggctggtgagccctctagctttctatacttctccctttttgtcataataaactgatgctgcttatcttttagttgcccttgagggtcagccctcccctcatgtggtctgactcctaagatgcgtttctgagaatctaattgaatttggctaagttttcctttgtgtattccccattaaggtaatggatgatggtgtaggaaagccagtgtgggctcttaaactctgggaccagatggatctggctttgagatctggctggattcttagcgttcagggcctcaagttccttacctgtaaaatggggtcatgatagggaggattaagtacggaggcatgtgacggtcttagcacagaactgtacacccaggaagtgccgagtaaattttagcttctctgtttttgttattcctattctttgtctgtctttcctagatatttattggtgcttattttttttccttttgataaagccacagttctgtttttctgtacaatcgacagctagcttgaaagccacagccctggactcactaggatcgattttattttgcttggagtgagtcttgttgcagggccttctgtgccttcggcaggtctggggttctgggttgtgtgaaatcctgtgaaccccttatctcctttggtggtgagcggggaggggtgagcagaaggctggtaagctagaccttaaatttccccagggcgtgcttgctctttctgacctggagaggctccccctgtggcacttagcacagagcgatctatggggtgggcttcaggggttgtttgtatgtggccagcacgaaggtacagataaacaaagggaggaatagccgcccagccttttccctgtccttgcatgctagtgatggaaataagagcaccgtagagcacaggcagatcaccaggtccttcacagccctttccccatttactctccaacgccagggttttatgaatcccaacattgggcatggatgctgcaaaaagtgggggctgccttccagctacaacagtccagccccaaagccctgcaggcaggtcccttgcccacaacccttgcagtgccagcagggactgccagacagcagaacaagccggtcctcagttctcctagctggccttccccctccttgcctctgggagcatccctgcccatctgggtcagcacgctagaggcatgctagagtctcccccagaagcatccagttgggctgaggggtccaggcgcctctgcagtaccaagctgagcagctgctgcgggagcaccgcagtgcagggcgggtgcacgaggagcaccaagcgagactgatggggccctcgcagccgccaccatcaacctgggggaggcaactcagcaaaggcaattaggaagctgctgcagctaattccataaagcgcttgagtgccacattatcactgatattagggagaaatgtgaattttaatttctgttcccttcgccttcacatggggttgaggccctgccagcatcaagatgtgtgcgtggtgtttgctatgatctcaccttctcggggagctgcttctttagtttgtttatttgttgtttatatcaccggggctgaatttctgagtctgtgctttgaaggctactgggagctgcatcatcttacctctgcaacatacctgcagcatccacagaacgttccttgggtgatctcactgctgcaccctgcatggggcctgtcaggcatcttcatgcaggaggaaatctttaagagtggccatcaagtgagtttgggttgtttttatttgcatttgcatcctgcaggcacaatggtctgctctcttccccaggcgcagcctgcaccaacacacccccggacatgaggggagatagctgctgggaagtgagagttatatggatttaatggggggcagttttgccaaaagacatttcactccagcctctgcttccttcagatatcaggactgaatattgtgttgtgaggcttttggaggagtcttgcctccagcgcctccctgggatgtgactcctccttggagctatgacttctgctacgtagagcactgtgtgccctgagtgagcaggatctgatgcccaccttgcacattcctcctgagcctgacctactcatttagaaggagatgagaggactttggagagggggcaggtcttgggaaacagtccctccacctgtgagtgtgtgtgagggctcagtggcctgccgcaggtctcacagtgaatcagaaatgggccaggtcctgaatgctggagtcctgactaccaggcttgggcccgggccagtgtattgaggccacagatggaagaagggttccacgtcccaccgtgggcttcttggacgacagggggaggcagccctgagccccatgccttgtctgctccctgtcccatgcctttcaaagctacccagctgatctccactggaaatctgttctagtttatgcggaagggtgtgtttgtgaactctcctcagattcaattgcatttgagcctgaatttcacctagagaaaatgttcctccagtgcatctatttttaacagccaaaatatttggtcccagtgtgtcatcagggaacagtccccttattaacattatctgtataagtgaagctgataggagacagaacaattagtcaatcgtttattcaacactaataaactatctggaaacctgaagcctccaaccttctccttttcctcagttgaggttcagatgatcaaatgctttcttttgggtagaatatcatggtttaggggaatctttagcaatcttaacagattcccaagcatacatttgcctttgtctaaatgttggacatccttttctttcttccttctctcacttcttcctgcttcaacaaacatccattgaatactcaatgaggtgtgcagagctatgttgggcacccaaatccctttgctgctgcatccacctttcccatcctcaccctgagtgcttcagtgacagcacactgcttgagttccctgcacacatccggctgtgtcacgcctctgtgcccatgcccgtgccattgccctgtttatactgccgaccctgctgtccttgtctggcttctgagcctcaattctacaggatgtcaggctttagcctgcagaaatgttacctggggagcttgttaagatgcattatttcaggagcctactccaagagaccctggcccagtaagcttggccccgagccccagaatctgcatgtgaacagacatctcaggtgactctcatttggtggtccgtggaccacgctttgagagacactgtttacatgttgtctctgggaaggcttctggctttccctaaagagactcagtcattccctcccttccattctggcctatgcacatcttgattgctgccctgtgcacctcttctctcccggcctgtgcacatcttccctctgtgatttttttacaaatccgtgtgcgtggaggctgtgttgtcctgggccagaggctggagctgctcttcccctgagccaggtctgaagcatgggctggcacagggtatagcctttctcaatgtgggcggcatgaatggagattttccctgccatagaaatgagggctttggagcaagtcagacattttatcttttaagtccaaaggtacccacatacacgtctgcttgttgaagcagtttatttagaaatcactgagcacagttgagtggccattctccaatttgtgagatggagggaaatttgttgacctgtcaccgatggcttttcttcttaccaaataggttaccgggacctgtggttactagccctttaacagaaaattgtttagtgaacatcagtttgaaagacgccatctgcttcctataaaagcctgctcctaatctccctggtgcaagaattgctccctcaggggccttttgggcacaaaactgtgttttttttctaagtcagtgcctttcaaacttcttaaaccgtggcttacagtaaagaatacatgttacattgcaacccgttacaacctcacatgtgaaacatgtttcatgaaacatcacttagtcttattctttgcagtgcaggctggtattttgtactttattctattatagtctattcaacgcaagttgactagacgggactctgttgtactctattctacactattctactctactctgttttctattctgttcattttagaaggctgactctgacctataaattgatttcacaatataataaatgtgttttaaaaacccgtgctctaaatgttaccggggtaaattataagttagttcagttttattctgggaggtgcagcattgatctttgagacctaggctgtgttttccccagtaataacgatcagtggtgatagctaatgcttatgagccagtcacagtgctgtgctgtctgtataaatttcatttcaccactgcgacgatcccatgggacaggtgctctgatggcatcattttccagaggaagacatgagttcatggaggtgatgtgacttgcccagggcaacacagctaataagtggtggcctcgatttgtgaatccagcgctgtctgaacatgaagcctggactctcaactgcatttgcatttgcctcttcctttgccagcagccactttagttggttccaagtgttagcactgggctatgcaatgtggaaggccagagagaggaaatttggagatggcatgctggggagcagtggggaggacatgtgagagagagcggggagattggaagagggcagtctgtgaagcttggggtgagcggtggtcctcggagcatctggtattttgcctagcacctagagaacctgcagtgtttttgcatctctggttatagtgcctgcctcctccttaaagcacccactgcatccggtgtttgttattgtacttgctggacaaatacttgttttcacatctccttctctgaccaggggtcattgttttgaggccagaaatgatggcttgtacttcttgggatgccaggacctggcccaaggagatgtcaccagggtttggtgactgattgagtgtatgaggatatcgtttaagttaatcctcataactagcccatgagtcatattccatcctcattctgcatttggggaagtagagcccaagatcacgaagctagtgatggaagagccaggtgaaggaccaccatcccagatgaaaaggtgactattatatttgcatgtgtttgttttttgttttctgaagattaattttgtcttgttccacctcctccttaggatttctcctcttaccatctggatctggttttctgtatttggatcccttttctttttgttgtttgggcaggatgtggttggaccagagagacactgggctggagggggcaggagtctggcctggggtctggacgtccaggttctagttctggcctgacactgctgagcttggggatctggggcagctcgctgcttctccctgggcttgcctgcagtagagctcaaaggtcagcacagttccagaggacagcacagttccagaggacagcagatccaacctcatttcctggtgcgttccaccatgagatgggtggcacttggttctgggctttcttcttttcactttgtcccagtgtgcccccatcccacccatacctgttgccctgcagctgtctgcatcaggtgtctctgtgagtggagggaggcatgcacgggctgctgtccccacctcggggtgctgtccagcaggctcagcagactcacgcctgcccacgctctgcagacaaggcagacttagctgaatggccaagagaagactaaagtcgcattcatgtcagagcaggcagaaatgacatagcattttggcaaattcttctctgcatttttgctgacattatctcccaggagcccttgtaccgcagcctcattcttagagttgtgtatgggaatggagtcttccttgaatgtaaaaggcaaaaataaaagggactaaaatatttgacatatgatgaagttctgtgatattttagacagtgagtaaattggtatttatataacctggtatattcatttccctgatccaccctcccttgaatgttgacttaataacatgcctgactaaatgacgttaattgctttaaactgccaaataaaaaaaaagccagcattcattcaacaagtgtggtgtgttcacagcccaggctggaggcagggaggagagctgagttctctctggggatggaaggctgagatgtaacctgagaggcttaggggaaatgcacatctcaggaacactggctgcttgggccagacataagcaatggagctgaggggtgaggttcctgaaaccggaagctggccgtgggttcgaatcctggctccaccagtggcttaaagcagtttctcagcttctctacttcccattttcctcttccttaaatgatccctatttcattggactgtcatgaggattaaattggatcaggaatttaaactttatctcagtgtctggcagtcataggaattcagtgaatgggcagcaaccattattttaattcttggcatcaaaggtgagacatctccttgggccaggtcctggcatgccgtcattcctggcctcaaaaagatgatccctggtcagagaaggagatgtgaaaacaaatatttgtccagcaggcacaaaaacaaatactggatgcagtgggtgctctaaggaggaggcagccactataacagagatgcaaaaacactgtaggttctccagtgctcagcaaaataccaggcgttctgaagaccactgctctccctgggcttcacaccctgccctcttccactcgccccactttctctcacatttcctctccattgctgccaggcatgccactcccaaatttcctctatctgggcctttgacattgcatagcccagtgctaacacttgggaccaactaaggtgactgctagcagaggaagaggcaaatgcaaatgcagttgggagtccaggcttcgtgttcagacagccctgggttcacagatcagtgccaccacttattagctgtgtggccttaggcaagtcacgtcacctctctgggttgcacacccaccctctgatgtcagtggtaatgcctcatccagagaatgttggttccctagagcaagacctttgtttggttggtcctgggctctcagttgctactgccttcggatttttggctcctgtaatagtctctgtcagaaaatatctatggaataaatgaatgagtgagtgtggagaatgaatgaacactttaccagctgagaaaactggggcttggagaagtcagtgagatcaaaagagacaaaacagaggtctgcctggtcctcagccatgactataagctagtgggggctcgttggcacctctctgtggtgttgtctaaatttccaagagaaacactgtctgatctgcaggtgaaacctgtgtgtgtgtgtgtgtgtgtgtgtgcgcgcgcgcgcgtgtgtgcatgcatgcctgagatgtgtcatattagatgtagactcatggttgtttagatgatcaattctcattcttgggtgcaatggcatactggtaacccttctctatttgggggaaaaaattccctaaaagctcttatgtgctgaattaaccacagagtccccctaggaagtcgaaacagcccatacccaaggctccattcaaagtgctttttctgggacttagtaagggaaagtgtttcccattgagctccctgtgtatgtatcatctttgccttgtttattgcaatagtgacttaagcctcccaaccaacctgtccaaaaccttcattttcccgaggcaatggtctatgaaactttactgctcatctgctttctcaggtcctgttttgtgggcaagaatgctgggttaagagaggaagagaaggagaggcagaggggctgaagtgtgaagaagagcactttgtattcttttttaaaaagtcctcgaactcagcccttgaatagtgcagtataaatttgagagatgatggctattaatactatgcttcttgtgtagcagcttttaatccaggatgtcaaaatacatcaataacacattctttttccatttctccacttcatttgtagggaggaactggagagcatctccagagaaaatgttactgccttggtccccagcagaagcacaagaaaacaacctgaatttgataattttatccattcatttattcattcgtttattcaacaaacatttttgcatcttgctactctgtccaggtatcatgccggctcttggattagaagaacaagcaaaataagattgcaccctcgtggagattacaatctaatgtgagaatcaggcatatctcaaataattagactaatgcatgcaagtctccttgcagttccatgaaggaatgctgatagttcatgacctgaagacctgctctggtctgggttcggaggaggcttgccaaggcatgattctttactgagaccagagggatgaggaattactatgacagaaaggtggaagaggggtccctggaccctttgtgctgctgtgaccctttcctgtcctggtccagcgtcaccctcactgctcctccttgtgtgagttcagggacttatcctgtactttcttcttggcccttcgttctcttgtttctactgccccaaactccctcccttgccactatagcagcttgttaaattctcagtcttcctggcctgattctttagttcagcaaagagcttttcagttcctgctatgccaggggctcagtgctgggctctcagttgctactgccttcaggaagccttattccaacctcctcctctttgtacctcactttgttcattatagctgaccttgatttctaattactgttgtagtatccgtgggccctttcctcagctccacaagtgtttcgaggcccttttctcatctttgttttcctcttggctccttagggcaaagcctgatgatggtgatgatgatgatgatgatgatacactactacttgttgaacatttaatgtaagcccagacagcattcagaatacctaagacatattacctcactaaatcctcacaaccctgtgagcaagctactctattaccatccatatttaactgatgaagaagctgaggcatggaatatgttaattggctttcccaaagctatttggctaggaggcagtagagccaggattccacaatgggcattttgactccagtgcctatgtctgtaaccactatactatacttcctttctctcatggcctgcatttgtggagttgtatctgtgaaaatgattgtgctagttagggacaggtataagccatccctctccctgagtgtgtacaagtacaacaaccctgagtgataaggagtaactagctaacactggttctccaagtacagtgaaaagcaggctgtgactaggtttctttgctccagaatttgttcccatcacaggaagtaggtagcaaggctaagacacacactggttataccagcaacaactgcttggttctggccaaattcttttgtcctagttgcttttcttcccaggattgaagaagctcccagggcagttgtcatgtaagtggcttcccctcaacacaaatgctgagttcattattgcaggtgtggatgttttgtatgatggcacgggcttcagaagtgctagagacaagaatttccttgtgttcatgtataaatgctggatgactgctgggaagaaataataactatgatcaacttggagcttttaaaattataaaacattgcctgttcactatggaaaattttggaaataatggataaatcaaaaagcaagtaacaacaaactgctatcccattattctggccttgtcattgttaatttttttatttttatttttatatttttgagatggaggcttgctctgtcgcccaggctggagtgcagtggcgtaatctcagctcactgcaagctctgactcccgggttcacaccattctcctgcctcagcctcccaagtagctgggactacaggcgcccgccagcatgcctggctaattttttgtatttttagtagagacggggtttcactgtgttagacaggatggtctcgatgttctgatcttgtgatccacctgcctcggcctcccaaagtgctggaattacaggcatgagccaccgtgcctggccgattgttaatattttgatgtatttctttgagtcttttttcttttgcttacatgtatgtatatttgtgtatatgtatatgtactttacataaatgagatcatattgtatcagctatgttataatgggaagatattttaaagcagattcaggcagtactgtagggaccacaaaaaatgctgctttttcatatgatagataaaatttatcctcttctttgaaaaattggaatgtaccagatgatacaaaaagaaagaaatttctgaatcttatgatgcaagaatattcacattaaaattttgcagcatttctttcaggctgctgaaaactgaaatcagattgtcaacataaagttattttgcattttctcccaactgtatcttatgagcatatcccctattactcatcattttccgaaatgatttgtgttctggctacaaaacatttccccctggggatgttgtgtggctgtgtccccttttccccagtgtggagcatgaaggttgttgcccaggtttcccccagtgtaaacagtgctctgatgaacatcttttctgtctctgtgaatttgattactgattatgcccctcagagcatcctcataaggggattcactgtgccaagggtgtgaacttcatcagcgctctccattctcgctgccctgtgtgtgtgcattgcatgtgcatatgtgaaattctcctctttgtttctcttgtagtatccagctctgtgtctgacacaggcttgcctgggagaccagacagatttggttggaccaaatggcctttactcttccttatataggcaagataatcaacataagatgcaaagccaggctctggggccaggcatacctgggttcaaatactggctttgctgcttactagttgtgtggatttgagcaaagtactcaacttatttgagttttagtttgctaagggaaaaataatatgcacttacggagttattatgaggattaagtgaaataatacatgtcaagagtttagcagagaattgaacacacagtaagggctcagtaatgccaagtgtttttatcatttttactgtttattccaaccttcaagcttaggactataggaattcgattcatttaaaaaacttctgctgtttttaacagaatttaaagatattcagagattagttgtgtgtttgttttaactactcgctgtggtttagagagaggtctcagggtgtcaagcttcactttaaatatctctttataggatctcccaaagactttgagattttagattggctcctaccctagaagactggcattaaaaagatagaccaagatctaagtgttggctgggacagagcaaactgtctgtttaagctcccaaatgcagttgttttagcagtctaataaattaagggtaacagtaataataggaattaacaatggctaattaaaatgcggtaagttgccaattatgtaatggggtctaaaccccggagtaaatggagatatttgcagatgcgaagttgcgctgtgcacggtggtaggggaccagggtgttttgataatgaaagtaccctggatgtgtgtgtgtggaattctggagcctggttgccaaactgcaagctctttactgctagcttgaaaaatggggagctctagacactgtaaagaattgcagtttttttcttttagggaagtgtccctctcagccatttaatatcactaagatgtctaagaaagaagaaggattccaggtggtttctgaatgacaggcttgttatatgcagcagagcctagccctgcatggcatatccccacatcctgggggctctgcgatctacgtttctctgggtagggtctgccctgtgcctgtctttagcactggtcatcctcagcacccagtgcagggcgcagcatccagagactgcatgaagtcgacaagtgagatagaccaacaggcaacttttcaatagggagacccctgtctgctttcaattatggaagagtgtccacttttatctttttcagtattgcttcgtcattgcctctcttctctccgggatggctgttggagcttttcattttagccttcacgtctcttaatatcgctttcatattttctctttatctttctgcactgcattttgaggggtttcatcagtttgtctttttttcacctactttctcttcaggtgggcctaatctcactgtttttacttgcttatatattttttaaaacctgtattatatttttcacttctagaatttctattatggttgttattgttgttgttatttaaataggtcttttttcctggttctctgttcgggatggggcagccctcttccctgctatcctcattcctgcagccttgacttctgcccttgacctggtgttaaaccctagccctaagccctgtatgcagtactgctactcctgggactttcttgaaggcgctggtccctgggtgtaactgttatgaatttgttggctaacttccttccagtctgtgacctccactacactcgaggtgaccttggcctctagttcccgagcacagggactgatgctgagagtggcttggtacatccacggatagtggggacaaaggcaggccttttgggaacaatgctgctctctttcccactgccgggagagcaggaggcttagctgcagctgataagctaggtctgcccagctctgcccacacaagttcactggcaggggagcaatgtttgtgtccagtctctcactcttcctctgtagggtttggtgcatgttaccattccatgggctgacacaggaatgtggggaaggggggcgtggcctagtgtgtctctttgatgagtgagctccacagagttctccacacatccagcagggcccatggaagctacaagggagtgtggtctttctgagccgcatgtgcacagaacgtcttagggggaggccctgagggagtctgcggggtgtcaccgttagggcccctccatccccgttggctcctgggccctgtttcccgcctgcgattgccacactttgtcacagggtggcagcaagaggcagacgtggaggctgcgcagggctctgtcacagttgtggacactgccaggctgcacgcctgcccctcctggagctttggacagatgtccgggccaaggctgcggctgaaggccttctcttacctgcatgaaagtttcagcaaagagggaaaatttcccctttcagtgaatgaggctgataatatccctagatttccaatttgccttttctgcatcagaacccatacctttttcagaggaacagtgcacgcctaccaaaaaagatgaaaaataaatgtcagagtgagagctgggggtgaggggacagctgggaattccccctgcactgcctgctggctgtcacttgggtgtgtggctttgctcttctgggccttagtgtccccatctgtaaaatgaggagaccagtcacatctgagtagtgaggctgacgtgtgaagtaaggaccttgagtgtctaaggccgtcagcttggcacagaggaagcgttggctcttctgactctaaaaaccagtatttggcatatatggaattagcagacgaaaggaatcagaggagcccttgcttggagaatttcccactaatctctggtaaaggagggaccaaaacagactcctttcttctccctccctcctttccttccttcattccttctttgctattgtcagtggtatcccatggtagaaacaatgacagactttggctccaaatggcctgggccagagcctgactcttccatactctgtgtgaccttgggcaagttatgtaacctttctgtgcctctgtttcctcccctgtacaatggggatgcttgtgagattttggtgaggattacagtgttagtgtagataaagcctggaacatggtaagccctgtattactgtttgcttttattgtcctgcttgactctgagagccaaggtgggcttttccaaaggcttcagaggtagttatgatgggaagatttttctgtttgtttgtttgtttttgagacggactcttgctctgtcgcccagctggagtgcactggcaccatctcggctcaccacaacctccgcctcctgggttcaagcaattctcctgcctcagccccccgaggagttgggactataggcgtgtgccaccatgcccagctaatttttatatttttagtagagacagggtttcaccatgctggccaggctggttttgaccttgtgatccgtccgccttggcgtcccaaagtgctgggattacaggcgtgagccactgcgcccagctgatgggaaggtttttatgccactggcttccgcgatggcccaaacatgctccttgacatgcccacgggctcttagctccagatgtctccttcattcttgctacccttccatatactacatacagtgctgggatgcagagaccaagctgaggtccctcccttgaagggctcacaatgtggagggacaggtagacacagaatcagacttcagaatggtcagaaatgccttccagtacaggctgcagacccagggagaggagccacttggttaaattttgggaggcattggggtgcaggagacctcaaaaaggtgactgtggaatcagaactaggcgctggaatgggcttgccaagtgaagaacgtgttccccactggaaggcagcttggacactagcatgtggcagggggttggggtttgcagggtcagagtcagtgtggcctgagccctcatataggtgaagcgaaaaaggaggtggagttggccagcaggtcaggaaccagtggaccacaggtggctgtgttttcatgtcagataagaagctttcaccgtggactgggtggaggatctgaccagttttatgccttaagaagacagctcgggccgggtgcggtggctcacgcctgtattcccagcattctgggaggctgaggcaggcagatcacttgaggtcaggagtttgagaccagcctgaccaacatggtgaaaccccatctctactaaaaatacaaaaattagccgggtgtggtggtgggcatctgtaatcccagctactcaggaggctgaggcaggaagatcacttgaacccgggagacagaggttgcagtgagctaagatcgtgccattgtgctccaccctgggtgacagagcaaaactccatcaaaaaaaaaaaaaaaaaaaaaatagacaactcaagcaccaaccaatacagatcacagggagaagtgagggatcctgaggggagcgagacagtccagtggtgaaggttttatgccacgacagtgagaactgcagaatgtgcactggggagatgttctggaggtagaatccatacttgtccctgacatttgtggactcagggaaggagcaaaatcgcaatgtcctcaacctgtggcccgacccctttcttggccatcctcctggccctaatcactacagcaaggggtcccatgtgcacacacacacacacacacacacacacacacatatgtgtggagccctcagcttgcataaatctatgctacctccaccagccacctcttggctgccttgggcctagggttgcacacataggcagtgttgtctgccctcaggaggaccacctgggaaaggggcccacacaagtccaagaagcaagctcaaggcaaacatttggttggggactttcaggatccctgaaagtattcggagtgaggcgtagatgaggaagggtgtgggttccgggttggcatgtccccttggcccacagactcctcctctctttgagaggatgtggctgtaggaaggagacaggggaccctctgatgcctggagcccagggcagggccttcagtggctgggtggtctcatcagccaaacaaggaacacatgacgaggagcagcttgtagggtgaggacagcaagctcggtccccagtgtgatgtgttttgggtacccacagcagtgtacctccaggttctctgagatttaaagaagtttggttagggggaagacggacagtgtctggctcttgaatgagtgcttcactgtgtactattttagtaacagagagggctgtcctgaagtatctgtctctctctctctctctctctctctctctctctctctctctctctctccctccctccctccctccctccctccctcttcctccccccttccttcttccctcccctccccctctgtttctctctttatctctctgtctctgtctctctttctgtctcatatggaaacacatacaagcacacacaaggactagtaacagatttgaccttctctggggaagttcagttttggggatttgcttccctccatagaagaaaaacccccaaaacttctggtggtctctagggagacaaaacaaaataaaaaagatgaaaaacccctagaactccagttttaggatgcagtttacctgctgggaactgaatttgtcattttctagtttttccttttcagtttctactttaaatgttaaaggtctaaactttgggaaatacttaggggattttgaaggaaaaatataatgaaaatgaaaggcacaatggaatcttttcattccaggggcaagagtatggaaatgagtgaaacccaagtggctctcctcagcccccttccctctctggagaagggcagggactccacaggcctggacacctcattcctgtcttgcttcttcagcagtgtgactatgtagtctaagtttgggaacatactggtatctctgggagccattatgagggctcaccaaataacttgggacatggtaaatcctcaataaatggtaatgtcattattatttctcttattataattactacaatttaattcctttaaatggtagagccatggtcaaattaccctggaagaggcgtaagtcatacatgaaaacaaaaatactagagaggaataaacaaaatgataattataattgagccaggaggattaggatgtattctaagaggagataactcttggtgtagctgtggaattggtgcttaatacatgatggatggatggatggatggatggatggatgagtgggtgtatggagaaagggacagagaggtgagtgaatggattggatggatgggtgaatggatgggtgggtgggtggatagacgaatgaatggatgtagggttggataatggatggatgggtaaatggatggatgagtgggtggatagatgaatgaatggatgtagggatagaggatagatggatgggtgaatggatggatgtgtgggtggatagatgaatgaatggatgcagggatgcattaatgggtggatgggtgaatggatggatgagtggatggacagatagatgaatgaatagatgtagggatgggttaatgggtggatgggtgaatggatgggttggtggataagtagattaattaatggatgtagagatggattaatggatggataggtgaatggaccggtgggtgaatagatgaatgaatggatgtagggacggataatggatggatgggtgaatggatggatggagagatgagtggatagatagttgggtgaatgaatggagtggacaggtggatgagtagatggatgaataggtagagggatggatagttgggggagggaggaaggaagggatgggtgaatgaatttctgagtggagatacttcaaataactgtgtttttctgctctcaggggccttggaattattggccattctcctgggcagttgttctatctcctcacctaagtccatatatctacttgctttaccagtgctggggcagtgagcaaggtcaccaggatgcatgggggcagtgtgacccccattaagagggatgttttgttgcaacaatgctgagagaatgatgtgtccatggaccagggacatacttgccccagcagttggcatacttattcttctgtgatctgtgctatgctgcctgctccttaagcccttcctgtgtagtcaggtgtcatacacaaagctaccttcagccgccttttctggactccgtctccattcctctgcctttatctccccctgcccccagggagaaaccctgttttctcagccatcctctttcctgcctcctcattgttgcccatactgttccctgctaaatcctcgtagagctgttactatttcaagcacctttgcaggtcctgctcaaatgccacctcttctatgaagcctttgctaagctccttaaaggggttctgattagaaacatgtttatgctactatgatcccggtctacaccattcccacaggctctccagaatgctgatccaagattgacttgtgtttggttatctgtgcccttgggtctctcttgggacactgagctccttcctagagggcagagactgtctgcttcagctctgtctcccacgtagcctggcaccaacatgtagtggttaatatcccagatcattctcatctcagaagcgggggcattgtgctgtggttgagtgcgctacacgccacacctgtggatttcgatcattgggtgtgtgcctgtttctttaaaagctgcattcctattggcagatcttctgatttgataggactttaaaatgatgctcacttaaaaaaaaatccatgagcgactttgtcttctcttcaaaatctttgattcaatgcatatgagcccatcttgaacagtctagcaaatagtaggtgcctcaaatatttctaaaggaataagtggatttttctcagaagctgttcatttgtccacctcgtggcccagggagcagtggcctgggcgatggacgcactgagtggtaagtgaatcaatcaagggcccagagagggagaggcaaaggcaaaatgaaaccacagaatgcaattgtcctgtcttcccttcttaatgtttaatagtgtttatgggacagtgacacatggagaaatatttaagagacatttatagatattttaaagtataacttatgattgatctttttaataccagaagaatttgtatttaagtgtgagaaaaaaactctgtggctgtgtgactcagggcttatttttcatgagaagattgccaggggagcccctcttgcttcttgaacttctggaaagcaagagaggtcccctgggaaggagctttctctaagttggatgcatacaggtgacactcatgatgtgggcaggaatccagggcttgggagagctttatcacacttgcttcctcattgtattgtgtaaatgagccacaggcccactgagaccccagtctctttttggagaagaatgcaaacagattcttctatattgaggacccatggtgcagaatgtgcagggcacagggtatcaggtcatagagaagttggtagctctgtgaccttgggcgggtataagttgctgttctgggcctgagtgtccacgtctgcaaaaaaaatgacagtgctctcctggggaaaggtaagatcatatgtgaaagctctgaccacagcagttgatagaggaaaaagtcaatgtcagcagcctgcctgaatcctttacttgaagacagtgaaagcagacagttaggaaaggagaaatgcactcatatttattttgcagcaaaaataaatatctaagtgagaaatgggtggcccctggacttgtgggcttgtggaataactcaaaccttatttattcagtcaacatttgttgagtatctgccatgtgttaggcaccgtgctcatgttattgtttatgaaggttgaaaaagacaaatgtggcctcagggaattgagtttgggaggagaactggatggatagatgctaaagaaataataaaacaaatgtatggctgatgaagagaaaccttaaaggagctatggcccatctcatgaacttttaaacatgactcacaagaagtatatttgcatagaagactggtgtgtgtgtatgtatgtgtagcaatggtttttccttatatgggcattgcactggtatttttattttattattttttaaatggaagttccaacccactaaattaattatattgcctattattgggttgccacttgcattctaaaaacttctgaagaacaattcttaaccttttctgctgcagttcctttggtgcacttttgataaagtgaaatgcaatataaagcccttcagagcgtccattttgggtagcattcactccctgaagaattagagtctaaataagatggtagactataatcaataattgaattctagacctagtcctagctttttagctgcaaaatatgggcatttgtgttggcatgattgctaggatttatatgcatatttttaactcccgataataagtggacaaaatgactctctttagctaattttaacgctcttttacatccagatacttattttctttcattcaaactcaaacaccttttactaaggttttactatgtatcaagtttttttaaaaaagagaaaaaacatagccaatacttgtctagtatttgttatgttcaaggtactaatctcagcacttacatgtaataactcattaaatacaataacctgattagggaggttgtcttattatttccattttacaaatgagaaccaaggttcatggaggttaattaatgggcccaaggtcaagtgatggagttacatttgaatccagaggtctcgggcttaggaacctgtgtttttaaaattgtgggctttactagcacatatgttaaaacagtcttttccatgccgcaaacgccccttactctttttcccccccgaatgattattgtttccccaattatagccataatatgccagtttaagtccttcttttgcaggtagcttgtcccaaggacaggcatcagtgtctcagcacctctgctttgatccatcctctgggtggatttacccagtctgcctttgtagagtctggccaagtgaggttttgtccaaccagattgtgagataacatggtgtggtggtgtacagccacatttaaaaaatccacgatcttgttgcagatgtacgattctgttccgtcaaacaaaaaaaaacctgccagctgcgattgcctctttctccttctgtgaagccaatgtcatgtttcctacgtttcagtcatttggttttaccttcatggttttacctgatacttattgtttttctataaattgacttacttaaaaaaatttcaataaaattatttaaatgaaaaccttgaatcagtactataaataaataacaaaccattatcaccttccatggtagaaataactgctatgaaaacaaaacaagagcattaaatcctagctggttatgtttgcctgctgatggccattagctcgaggcctgtcctctctctgtaaaatggaacattggaaaagtggttatagtggtcagggtttagtggtctatggtttagtggtcagcatgctaggctatgctgtggtagtaagtacaacattgaaatcttgtgacttaccccaacaaagctttacctatgggtcacacaaagcctgctgggctcagagtactccccagggtcgtgtccatcctgaatctccactcaaggctgcagactgtattcattctggctccatcaccacatcatacagcttgtctggtggctgcagaaagggaggagagggtgaggatgcaccatctttacctgccttggctcagaagggaccacataacttctgctcacatctatcggtcagagccagttatatggcctaggtctcacgggaagggacaacactgggaaataaagaagaacaagtgagtattttgttaaaggtaaccttaaatacaacatcgagattttgttttattttgattggttttgtttgcgtttttctcttaacacaagcagaaacattgaaaacaagttataaagaggaaaactccctcatggtgtggatgtatgttatctaacgttgggcctgagaactctttgccatcagctctcatgttcagtctgcaggaatccatgctttagcaggtcccagcaccaaacctgtgaccgtggggccattgaggaaggtcattcaggagcagggcaacttcccagaacaaaacttcaacatgaacaaattttgtttgtttcggaaagggatacctcccagaactttgatttaccatagtttaaagatgcatagaatgtcacttttattgttttcatgtgatcttggccttttcaactgaggttttaccaaacacgttattctctttaggaacaggctaattttgtttttttgaggctttagcctggtttatgtgcaaatgttagatctccccagctagaagacagcttcatgagtataggaaacccttcagtcttcaaattgcccaggtgttcagtcaccagcagtagatcctgaattggtgatctgggtgcaaatagcttatttacaaggcaaacctgcgaatcaccagcaggggagcggggaaatgagacagggacaagaaggacatccataaagggtgtgctatcaagccagttattgttgtggacaactggaatgtcattttctagggaattctgggagccactggagcatatacaccacaaaattatcccacccacggaggagggagctgggccttcatacactaatgccgtcagtcactggatgagagctgctcctgggagtatgttcctcagaacttcctgcccagctggaaggtgagcggatgtgaagtggagcaccaattgcatctgctacacccgtagtgcctattggtcagtctttttgagtccctgggagccagactccacgatggcccccattccctcccggtcttcatgttcttatattgttctctgccactctgaagcagggctggcccttcctggcagaagtgatgatgtgtgacttctcagtctttgtctttgccttggtggagccagccaccatgtcatgagaggctcatgtgggtagaagctgaagcgctggacaaccgttagcactaactgctagccacgtgagggagccactttggaagtggatcctccaacgtcatttagcctttaggtgatggtgctcctagctgaggcaaccacatgagatacccaccatgagaactgctcagctgagcccttccccaattcctgacccacagaaaccatgtgagatgagaaatgatcattatttttttaagctattagtttttgaagtgacttgctatacagtaatagatagtacattaactgtattagtctgctagaactgctataacaaaatgccatagactgggtggcttaagcaactagaaatgtattctctcacagttctggaggctggaagtccaaggtcaaggtgtcctcaggattggtttctggtgagggctttctttctggcctgcagacagccacctttttgtgtcctcacatggtctttcccctgtgtgcatgtagaaagagctctctggtgtctcttcctgttcttataaagacaccagtaccagcagatagcttaaggccccaacttcatgactctttttaaacttaataaccttctcaaaggctccacctccattaccaatgggggttagggcttcagcgtatgaattttggagtgtgtgtagggggacacaatatatcccataacactcaccaaagtcttgcatgttttggaagtcagcagaggtctccagcccctgtgcttggatgacttcctctttaagtgagggataacaagtcaaacaacgatgtgactttggtgggaacataaagaagaaacgggggccaggcacggtggctcacgcctgtaatcgcagcactttgggaggcctaggtgggcagatccctgaggtcgggagttcgagaccagcctgaccaacatggagaatccctgtctctactaaaaaaatacaaaattagccgagcatggtggtgcatgcctgtaatcctcgttacttgggaggctgaggcaggaggatcgcttgaacccgggaggcgggggttgcagcgagccgagatggcgccattgcactccagcctgggcaacaagagtgaaaactccgtctaaaaaaaacaaaaaagcaaaaaaagcaaaaaaacccaaccaaacaaaaaaaaaaaaaaaaaaaagaaatggggataaattatctgtgcaaagattcttagtgagcagcttccttgtaacgattacatgcagaagttctttgggggaggtaggagaagaaagaagcaagatataattttaaaaggagctgcactatttcagaaggaaattgccacctaaggtgggaggcattgcagcttcctggtgctggaagcactgaagattgccctgtctcctgtgttgcctgtaatctctggccttggttccttcagtctggctacttagagctttgtgattctttagcaggggctgggaggtattaggagcccctggccctgtatttctgtggcattttatttggcctctctagggggtgtattttcgagcagcagctgtgaggtcaccctgggtgcagccagatccccatacctgctaatttagctccttttgtgagctattttatttcggatgccttctgtggaaattttgttccagactgacttgaaagtgttttcagcatcgattctctctttgaacagtataaccagggtttgccacttgtggggaaaaaaggagctcatcttgagctttaagaacagtatgaggtgggcttcctgtgtccagcccaccccagtgagaattatgccatgtgtcttctctccaggataaaccgacttttccattttacataaaatcgaatctcttgaataacaaagagtactgtagatactgaactggcttctcgggactagatggacacccttagtttttcagggctaataattgttttttttccatgatcaagttcccacatggacttcgcccacagtgcttgtttttctgtgttgtttgaggtagtggagagagagcacttcctcttggggaaatgattttcatttgctcacttagcaagcacttttgatcctgttttgcttgaagcttcatgtcagacctgcccatctgcatacatgcaaaagaagtaggctctctgggtccttcttctgtgatggtcattagtttacaaatatttcatttgtcctacctctgtgcacatgaaatcgaactccctgccctgctgaaattaagtattgtcgtatgacttactttggccagtggattatgagtgggggtgatctgttttatctcctggaagaagcctctaagagtcacgtgtctgttcacactgcccagcaattgtattgtttccaatgccagaagctttgcctcccctccagtttaaatcatccttttgaatcaaaccctctttaaattattcttgtttgcctggatcatttattttctgttgggattttgattgattcagtcatcataaaaacagaacatgatcattcaagatgatttagaaagtggggatgtagaaataagtttaagaaaaaaaatccatagttttatacccaaacatccctgatattaacgtggtcattttttttttccttcttgacttttccttgctcagtgcattgtgctttaatttggttgtgatcatttggtatgtacaattttaggtgctttgtcatgaacattatgttttacatggtattattacacatcataagagtcctttttaataactgtataataagtgatgcagtttaaggaaaaaaattctaaattttaatatcataagaaattatattctgcatagctgaagtatatcctgtggtagaagagggggtaaatcaagaaaaacaaattcaatgaacctttctccggtgcctcccgtgtgccaggcttgtgttgggtgcaagatatggaagcaattatgacagaatcatcaagttcccatgggcttaacactggtaaatgttgattctatgtctaatcctcttgggactaggttggatttgttacccacaaaattttttaaaaatctaatttgaccaatagaatttccctcttttgaaaaataatacacaaaatattgctcttttccctggagaggattcaagcttttgcaatttgggggagatagactttataaaaaaaagagacaaaatcatgaataggaaagaaatcacaacacattatttaatctgaaagataaaagtatcgtttatatagcaaacatactacaaacatccagaagataacatacaattattattattttataaattgttttaattaactgcctggcaagctctgtaatcttgtttctttcttctagtttttggctgagtgcttgttgatctactcttcatatgatgatgattttgtaatattgttttctatggagagaataggaagatgattcattctcttctggcagtggttttccacatggtctgcacaggagaatattttgggaacttttaagaatcctaatgttcagatgctccctaggtccattaaatcagtattgctggggccgggtgcagtggctcatgcctgtaatcccggcactttgggaggccaaggtgggtggatcacctgagggcaggagttcgagaccagcctggccaacatggcaaaaccctatctctactaaaaatacaaaaatttagctgggtgtggtggcgggcgcctgtaattccagctactcaggatgctgaggcaggagaactgcttgaacctgggaggcagaggttgcagtgagccaagattgcgccactgtactccagcctgggcaacagagggtgactctgtctcaaaaaaaataaaataaaataaaataaaggaattgctgagaccctggcatcagtcagagccccagctctagaatgggtgatggaagtttgatttttactattgatcatttagaaaagtttcctttagcttcactgcttgttactggcattgtcatatatgtttttaggcttgttgtcaaatctgggaagacctctctccaatttctttcagaagtaagctgtgagacttcacgttgtttcaagttttctgtgcggtaactgatcttaaatgttctttgaatggaagacactcattaaccaatttgtaatgtgtcctcattttctgtgtattttatgagttttatgttatttttcattgagatcagtatttttatgtcaaaggagtaagaaattaaattgcctgaagaaatgggattggatgagaccattttgccgaaagaaaaacatgagcaaaggcgaagtccagcaggcgagtccagtgtggggaggcagccaggtgccaggtttgcagctgtgtggatgccattgaaaggggagcctgtgtgcaggtgggaaagggctgtgtgctggcagttgtttagtaagggagcaatatgttcatgaaagacagtgtcatgccatgttgaaattattcccttcacacacgtaaaagcggtgtgaatcccagctctgccaatattactaaccagcaatgaccatacagggaaataaaacatacagatagccctctgcacccaaacccaacccatctccactgaactcccccttcaccagatccttacactgccgtggccataccattgccacctgctcagaagagaagcatgacgggcaagttggggtaaaggagacagcagtcttagccaattgagattaaaatatcctacttttgttaattttcaaaaacataggcctgtgaacacatgttagttccccttggaggggcacctaccagggaggatccctgaattgtgagtgtctttagcgtcacagttagcccacctttgcttctgcatatgaattagtaactgaatggcatatatgctgacaaagctcaggcttaagtggcaacagaagagttgttgatgacaaagttctaagccaaggaccttaaaaagcagtgcaaacttgtgtgcccttcccagcatgttcattgtatttgaaatgactgttgcttttttaggtagcagcttcacaaacctgttcaatatcatgatatgaaaagcatcattcttaggttgccatcctctttccattgtgtaccttgacaagagagtcctttaggaaatacagcagaagctgaacagaagccagcctagttaggggttctgagtctcctcattttctgacacaaaacagcgatgattgctccttggggagtcaccactgtgtgcatttacaccttcccagctgtaggtgccaaggtttagcagctcataatctggtttcacattcctggtctttgccatttctgagatgtatggagcctggtgaatcctggaggggctcgggtcatgggcagtgctcttccccagaacttgtttgagacaaggcaagagatggaatttagcctcggtctgaaggcgaggacactgggccagaggctgtctttcactcaaggatatttattgagtgcctgctttgtcccaggtttgggttgtgtgctggggatagagatgtttcagctactcttgctgagtaacgacacaccgcaaaacttcattgcgaaaaataaccattttggtgtgctcatggattctggggtcaggaatttggacacgggaggggtggcctgtgtctgctgggacctcatctgggatgacgaagactgaggatgacttgatggctggggattggaatcatctagagacagctttgctcacatgcatgtactggaacctcagctgggctgtcggctggaaccctatgtggggcctctccatatagtctctgtctaggatggtttgggcttcctcataatgtgacaggtgggatccaagagcaagcatccctagagaacaaggaagaagagctcgcttcaaaaatcctttggcatcacttatgccatcctggttgagtctgtaaaattccacccaacttcaaggtagggaagtggtatgagtttaaaactaacatgtagaatgggaaatattgtgcccatttaggaaaaatggaatctcaaagcacccatattctgcccttatggaactaataacctagtagggaagacagtgctgccccagatcactcaacaggtatctattgagcacctgtaatgtgccagattctgtcctaaggattcagagatacgtaagacagatggaatccctgcctgctggtgcagaaatggatgaggaacaatgaaattaatatataatgtaatttcaggtagtaagtggtatgaagaacaataaatagggtaaggggatagagaatagtgggaggtgctgcctcagatagggcagttagagaagcctcactgattggttacattctaggcaaagggaaaaacaagtgcaaggtccagaaacagaaatactcttgacatatttgagaaatggtcagaagaccagtgtggctggaacacagccagtgaggaggagtggttgcaaatgaggttggagaagcatcaaggggtcagatgatgtagggctatgcaggttgtggtgatgactttggatttgacactaagtgcttataagagccaacttttgctgagttatactgcagtaacaaccaaatctcagtgtcctacaacagctaattgtggtaagtactgtgaaggaaaatctcaagggaaaccttaaggaatggctacctacagtccaccttttaactgagacccacacggttgcatgaccttcatgagttggccatggctcttttccacgttcctttcatcccaggactccggctgaaggacctgccattctctgggagactgctatccttgtagcagaaggaaagggcgatggtggaatccataatggcttctaaagctgctgttttgaagtgcatgtttcacttcctgctcgcgtttcattagtgaaaataagtcacatggccaagcctgatagcagcggagtgggggtgattaattctctcacagggaggggtagaaatcagttaggtgcaagcaacaccctctaactgcgagccattggaggcttttgagtgggtaatgacataatctagtttgcatttgcggaagatcccatgcagaaacaaatgtcacactgcagctgcaaggacagtgaggagggagatggccatggtgccttggtccccagagtgacggcatgcggaggcgtcaatgcatctacctccagcacaccaggcatgatgtcaggtgcagcaggaggtacctggccctttgctacacagaccacatggtcttgctggggacaagacctagggaacagctcattttggtacagtgtggttggttcctggagagggagagggaatagcccacgggctaagcagcccactgcaggtacctaatgcaaccaggaaggtcagggaaggagatggccagccacgcggtggagtttgaacatcatgtagcagttagccaggtgaagaggagatgctggggagacagggagaggccactcctggctgagggacctgtacctgcaaagactctcaggggaggaggacggctttctgtcactgtttctgtgtgtgagggaaatcagagggtaggcccggctgtcccctgcctttcctgtggggcctgactgcacgtaccccctctccccaaaccctccaggagttctgagtctctacctggatcttgattccactggcatgaaatctgtgaatctcacctcgagaatcctccctctgctgccgcaggatgggaccaacagttccctgcagtggcaagggagctgttcacacactgagcgagcagtcacagctgccctgagctccacattctcctcctcgggggactcccctggaattacctttgtcattttactttctcaacccctgtgtttcctctgatatcttacttatctctggtctttttgtccagacagctcttaagccttgggaggaaccttttcctctgatccctttttaggccattatcaagttcagggtgggagggtagagtcactgtctttccaggccttgctgcatcccttagagaccttcggagggggcactttgtgaccagtggggatgggggaaggatggcttggtgtgtctgtcctcacccactaccctctgcccacttctgcctgcccttcctctgtgtggcatatacagtactgcacccctgagcaggacattccccagtgagagccccaggcccgacacttccaggctgtgtggccttgatcaagttagtttccctttcgtgattcagattcctctcaggctgcttgtgcaaactcaacataagaaagtctgcgaagctcttaacccagggcctgggccatgctagggggatcagtaagcagtttctgccacctctgttactgccgctttcacctttccttgtggaaaagagaagcagccagaaaagctgggttttagccccagctctgcctcttaactagctaagtaaatgtgggcagaatgcttgacttctctgaatctcattttttttttttttttttttgtcaaacaagatgaatgaacaagatcggtcttttttgatggggacttgaatggtgtgtggggggacagttctttgtgtgggacggtccacactaaatgccagttatccccacccattgttacaacccaaatgtcaccccccaccaagtatttctccatgtccctatgggttggtggtggaactgtccctgactgaggaccactgaactagcttaccctaaacttcactcctgctctggtgtcctgtgtgggtggaaaagtgaggacccagtggagcaggtagacaaagatcagttcaacagggccctctgctcctttgatattgggacagcttcacttcctctgaattagaagcttcttgacctccatatattgaggaaggaaggggtttctaacaaatgaagaaacaggctgggcacagtggctcatgcctgtaattcccctttgggaagcccagttccatctctaaaaaaaaaaaaaaaaaaagaaaaattagccaggtgtggtggtgcacacctgtagtcccagctactccggaggctgaggtgggaggattgcttgagccgaggtgggaggattgctcgagcccaggtgtttgaggctgcagtgagccatgcgcatgctactgcactccagcttgggtgacagaatgagaccctgtctctaaaaacaacaacaacaaatgaagaaacaaagctgattctgtgctctggatccctctttgtcccctagtcacatcttatcattaatatatgataccatgggatggtatagaggcaaccatgtggtcaccagaaatatgcatttgatctccagtggtgtaaactgaagtgtgccatccagagaaaggagtcacaaagggaggtttaggcatgccaataagagaggagcccagacatgggaagagtacagctgtgtgcctgaaatacttgttgccctgtgtgccaggaacccacgaggtgggtggaggctttgttgagatggttgggcttcaccgtgactatccatgtcaagctggctgtgtttcctttcacactgtctcaacatttcaaagaggaaatccaaggttggagatgtaactgctggggacttttcttttccagcagatactctgtggtcctgaggaccactggcaaccaaagtccatcatgtcccattcccatttattctcccgaggctgacagctctaaattataatgctccttgctgaataccattaatcttaagcaagcaacttactgcaagttattagctgctcaccttgaaatcctatgaataaagaagaaaattacccttctgtccagagccccttgttaattgaatatgtggtagaagaatacagagagtgtcattaatttcaagatacaggagtttgttgccccctttttgtttttattttacccttggatgttcatttaattaaattatttaaatttggtaatgtggggaagataatatgggggaagattttattttcttccccagtacctttaatcacaatcatcttagttaaaaaggtgttagtgatgctattgcctgtgtggtgcttcatttataggagatgaattttgaaaagtttgttgcacttatcagataactttatgaaccttttggaacattttaaatgagtttttatgagacttccatgacaatattctgtgtatctctttgatgtggagagaggaagattgcagacttcatggtctgaaaaattatgatgtatttttatttacattggactgatgatagatttcaggtcatttttcctatcaaagatatcctgatgaaagttaatattttgcgggaagattttatgagttataatattacctggattacagttttcttgaattacgtaaaaacgtcttgtgagattgttttagggaaaaggattccacttgtcttcaggtcttgggggaagcatcttactccctttgcggaacaagaatttctatgtacagagtgtcctgctgtttcctctgcttgcacttaattccctccaccttgcattcttattgagttattgagttattctgttgagttattgagacagctgtgttccccactaggtcataagctcacctggggtgtttagatattcccaaaccaggtatatagttgatccacagtaaattgttctcagtcaagccatgttcaatggaaatatgtatgattttgctagctctgcaaaggcactgattggacctgataccctccaactctgattaatgcctccccagccttctgcttttctctcaccaagacatagcatcttccagcgggttccttatacccatctgccatttgtcattgccatacaccgcagagcctggggatttgtaatgactaagctcaggtttgggagataatgtgtccaacttgaccagctcccgtggagtcttggtgaggtcaaggagaaccacatttggatttttgggtctttgatgtagtgcaaagccaacttttagaatcagagagtgtgggaggaggggttggggtctagaggtcatcttgtttaccaccttcattacttggggtgcagaggaatggatacccaacgtagttaaggtggacagagctgcttggtggaatagtgaggtccttgtcactggagaggctctggcggaagtggaatggaagtccatttggttgtgactgttgtaggaggctttaagtcttgggacaaggcagacttaagggagcattagaacagaagaccttaaagggctccctgtagattcttatcttgtctaattcaagggtgagcgcagtatttacagattcttctttgcttttgcttttcttctccatgaatgacagtcccttccttgtcattttttttccatagcttcctcttcttcagtccactgtcttctcatttttgccctaagcactttccttcactcctttctgctctatttttgtctacatttttctttctttctttcctttcctatatttgacttgttagtgagcccttcagtagagccagctcagggctgttctatttgattccttgtgactgaaagaagagatcttgagaagagaacagttaagtggctggtggaaatgaggtcagtgggagcctctgtacagaatctgggacactaggttctccagaaatgcttatggaatgaatgagtttgtaacttccattcgcttgggctaacatgatttcacatttgcataagggtgagtaggttgtgtttggtaattcctgcaaaaatatcattggaattttctacctgcttggagtgcttatcttttaaaatgtgaagataagtgaacagccgcgcagtgatgttgaataagttagggtgattttagggtgggagttgtttgcagttttaaatggagagcccagatttggaattcacctcccatgatgctgtgggtactgaggagccaccttaggaggcctggattaattctgtttatagtccaaatgagattcccagagtgtttgctgaggtcagccgacttctcagcattcctgccactgttactgtggttggcctaggagcatgggaccaggccactcctttagggcaggcttgttgactctctgaagtttgtttatgcaaatgaattaacaactgatgcaaatgggagagatggaaggcccctttaggtggtccaggccagcattccacagagtccaaaagctcagccaagccaatttgcagggtctcatctatttcaatatttagtgccaggaaagctgacctgtaggtgccgcatcccaggggttctgttctgaactctcactgtcctgcgtggaagatcttctgtgcactggcctgaaattcccttgctgcgccattttatctttcttggttttagtatgtattgtatggtgctcaaaacggtgagattgaaatagatgtttgaggacactgagaatatgaaacatgccatcacaactggcagggaaatgttgcttatcctgagtctgcttgtgagctgtgagttagttgtgacacgagagaccccaagggtcattggttttaaaagcacaaaactgaaaaactacagaacaaaacaaacaagcagcttttcagatttcttcgaaagtatcaaggctgaaatagatcagtgtctggtcttgaacctgcaaaaaaagtaacggcctgtgtgattagggtccatgcctaccacagggctgtggcctgtgcccacagacccactcagctcatgtaaagggatttttttggatatagtccttttcttctgggctccggagattgaaaataaagcttcatggtccatggaaagggattgggaaccaagttacattttgctcagtggaccatggcctctcattttgattctgtttcatgcatttatttcacagtttattactgcacttcggctatacacagatacttgccctcatgaagctcatggtttagtaggaaaaacagaaaataaataaataaataaataaaaattaaatggtgactcatgcaataaagacaacagagaacagtgatagtagtgtgcatgtatgcaaacgtgcatgtgtgtgcgtgcgtgcttgtatgtgtgtgtatgtgtgtgcatgtgtgtgtgcaagtgtgcatgtgtgcaagtgtgcgtgtgtgcgagtgtgcatgtgtgtgtgtttgtgtgtgtgtgtggaggtggtgatgatggatcagggaaacatttcctatataaggtggagaagaaaggcctctctctgaagaggacacatttcagccaagatctgaatgataatgatttttccaggtcaagagtgagggagaaatggccgagcgtggtggctcatgcctgtaatccccgcagtatgggtggctgaggtgggctgatcacctgatgtcaagagttggagaccagcctggccaacatggtgaaactccgtcactactaaaaatacaaaaattagccaggcgtggtggtgggcatctgtaatcccagctacttgggaggctgaggcaggacaatcacttggacctggaaggcacggaggttgcagtgagccgagattgcgctattgcactccagcctgggtgatagagtgagcctccatctcaaaaaaaaaaaaaaaaaaagtgagggggtaaggatggcctgggagtaggccattccagcaacaggtacccaggcggttctgccaagagacccagagaagaccaggataatttgcccctgggctctgttgaccttcagagagaggcttccacatcagacccaataggagcagaagtttgttgattcccagtacaaaataaattactgagtaaacgtcaaaatataattaacagttagtgtatatgataaacatattcttgattcagattaagtcttaatggccagatttagggccactcggaagcacagtttggaatgccaaaatattgctgctgttttggaatgccaaaatattgctgctgtgcacctcctctgtgttgatcattttgtcctaggagggccaagaaatctcccttcctccctgactacctccctccctccctcctttcttccttccttcctcctttcagttcagcaatatcagccaagggcagatcagtgagtaaacccttcttctgttggaatcaatttagctcagtagaagctttttatataaagtctggcaagtgtacattttaaagcttctattctgtttaagaaaccaaattttcatcaaacttgaactcagctggaaagatgagtagattttattattttgccatgccaatagattccagtcattctctaggctttgtcagatgttttaaactaaaaaaaaaatgacaggtggagtaatttttatgaaccttatgctgaattatcagagaccttatgtattgatagagagagcctagacagggggcctgaccgtccgactcagggaggagaaagcgtgtggaccaaatgttcctgaaggaccttacacatctggaactttgaggattccctattttaggtactttgatggaagtttcatgagccttctgtttacattttaaagatgatgacttttttttttttttttttttttaggaatagctagatgatccgggaagttgcttactgaggctttgtcatgaggcatcagttactttgctgtgccaaagtgatcttgatgggttactgtgagaggagcccaaggaagagctttgatgattcttaaaccaaattctcgagtgctatcgggtacattctgacaggccctgcagtcttcgtggttgtagttttcttgggtggcagggctgacccctggcagtggcacgattcactctggaatgcattcagagccattggagatcatgctgccctaagtaaatcactgtcactgaggaagggcatgttgtttataaacacccagattccagatatgaaatattttatctccaactctattggaaaaaattataatctaaaatgattattaattaaaacaactcagatgtctcttgacactgagaagcacagatgattaggtaaggtgggactcacaaaaagcttaaaggtttaaactgttcaagctaccagccagagggtgaggagcagagttctgactcttcagtttggaatgttttgctagcccaaggtctgcttctccaggaccatggtctgtggctctaatggcatgccacttccatgggatatcttcccactgaactttggattattcgaggctgaacttcttggtccctgtctcttcccatgtctgtctgcctgctcctgctgaccattttcctctatcttctgtccttcctgtctgtctgcatctccaacattcatgcctgtctctggatgtccttctttcctcaactggagcctacaaagatctcactgtctccttccttttctcccgactctggccatctcctctaaatggccaaagagaaagctctctcttatttccacggatggcctgaccatggatctgtcgagcattttccttgcgagcactcctttgcacagaagagcggtcctttgcggtgtttgccctgcaggtctgccctgccagtgcctccttcaggcattcaccactccactctccccttccacacccaacaatgctgtttactctccgtgggctgccagtgtaaatccacattgaaaggtgttcatttgatttggcagaaaacgtgttattcatattaggcctgtgcacttgttttcggtcgagcctttgacatgtagtctttggcaagccctggttgctacacacagcactgctgcaagctgcttggatgtgacagtattgtgggtttcccccctctctggaaatgtaaactctccctaaatctaaagactccctctccctttgttgtacattttaaaatgtggtctcgcttcctgaatggcccactacatataggtggggatgacgtaaacccagctgggcaagtgcgggcctagaacccaatgctaagtacatggagaaggtgactactaattctatataacatattttgcagagtaaaccttagttctagaataaaagtatgtgaattagattgaaacatgaaactgttgatatttcatcatttttgacttaacaaaactgcccatttcatatgattcaacctactagtattgaatgactagaaggcagggtggacattgtttacaataactctttgctttctatttcattgattcatttcttcaaggtacatctattgatcatattttctatgctgaacattttagtaggtattgggattacaaagagaaatcaagtttctttccttccctctagccaggaagaccaacacttaaccaaatccaaaacatgtcaggtgcttcaagaagggcctctctgagagagctgagggcaggatggggtgaccagctatcctggtttgcccagaactgtcccagttttagcactgaaagtcctgggcactaaaggaactgggaccagttcatactaagggatgggggcatttatggctctttgcaaaaataacagctctgtgacctgaaatgaagcccattcctccaccttgggagaggcaaggagtacatcagcaatatgaaagctccatgaagtctcagagtggagaaaactgtttaatttgtttaaccagaatttctctgacttatttgatcttggaaccctttttgtgcttaacattctgcaaacatctttgggtcctcccctctttgtcccttggggaaaaattatatcattctctatcctaaagtgcacattattaccttgtattattagccttctccatgatttgggcaacaattagtattaaaatagcccatcacaagaaaatttaataataatgcaattttaaaaggtttttcagaaggttgctaatgtgctgtgatgggttatgagttaccacaaggctgctttttttctggccgacacacacagaaccaggctgcttgctcactctttctgcaagtgaattttttgcaccaaaggcagaagcaagttgttatggaaacggaaacagtctccccatctgagaacagcaccttgctaataattagagaacatggctgagcaaactttagtggaaatgattaatctttgcaaagcacaggtacgtctaaaagattgaacaggtgttgtttggcctttgcactttccagccccagaaaattttaatttagaaagagctgaggaagctcaggctttgagtctttactgactttacaaaagaaagtcatcctttaatataatagtaattggctaatttaaaattttaaagatctctcctaagcttatagagtgtcagcgtggtttgtaaatccctgtgagcttgttaaaatgcagattcctgggcctctggacccactgggggatggttttggaatttgattgcttaacaaactgtccagatgtgtttgatgctagctaattggagctggtccttgctctaggttaggtatcggtaaacattttctgtaaagagatggataataaatagtttaggctttgcaactctatatatttgtagcacgacagcagccagagacagtacataaaggcagggacatgcctgtattccagtacaatttcatgtacaaaaacaggcaattgtaggaaactatggccccatggaggaatttggccatagtttgctgatccctgctgtaggatgtgctaagtgctgcccaattgttgggacttccattttcaaaagtatttgtgttaaaagccagccatccatacagactcccccttcagtcctacccacagacaggcaaaaagaagatgcctttgctaggtgaggggagacggttttgaacgatttgatggcaaaccattctgataaccacagttgctgagatggtttttaagtgggttgggatcttcttgccacctttcttaattgtggatgaggtgatttcctggtttgggggttattacaaaagtagaatgatgagcttgaactattttttttttgagacagaatctcgctctgtcgcccaggctggagtgcagtggcgcgatctcagctcactgaaagctccgcctcccgggttcgcgccattctcctgcctccgtctcctgagtagctgggactacaggcgcccgccaccacgcctggctaatttttagtattttttggtagagatggggtttcaccgtgttagccaggatggtttcgatctcctgaccttgtgatccacccgccttggcctcccaaagtgctgggattacaggcgtgagccactgtgcctggcctgaagttggactattttgaagaaaaatgtcaggtttttctggaaggaggagatggacatttggtagtggcagtgttggtggaggcatcgatttttgaggtattgttacccttggtttctgcctcatttgctgctataggccttttggttgagcttcagctgtgtctggggcagggggttttgaagtgaggcacggccagctccatctgcacagttggatttgtacctatcccctgacttcccaagacattgaaactcttctttgagagttcagacaattcagtgacttaagtttttcttgccatttcaagtgccaccatagcacagactgtgtcacacacattgtagctggtttttcattgcttttaaaatgcttttgaagtgaaagggggccccattgtgtaagtgttcatagttagcattagcaaatggacttgtaggggccatgggggatgtttcctctggccctctcaagatttgctgagaaattaactctcaagaggcagattaaggccgggcgcggtggtttacgcctgtaatccccgcgctttgggagaccgaggcgggcgggtcatgagatcaggagatggagaccatcctggctagcatggtgaaaccccgtctctactaaaaaaaaaaattagctgggcatggtggcgggcgcctgtagtcccagctactcggaaggctgaggcaggagaatggtgtgaacccgggaggcagaacttgcagtgagctgaggttgcgacactgcactccagcctggggtgacaaagcgagactctgtctcaaaaaaaaaaaaaaaaaaaaagcagattaattggagaaagtgcatatacatttatttaatcattgttttatgttatacaggcgccctcggaatgaagacccagcccccagtggggtgcagaagctgatataccatcttgaggttacagaaagaataggggcttggcaaaacaggtcattggaggggaagaagaggaattttgttgtggtgcagtaaatgattacagggagaagtcagtgggcttgaagagcatacaatgtctgggacaatgtcttttgggcccaaagagtggaccattcattgtttgatataaaagtctgtccaggtgtgttggcagactttagtcttccttcctgagatatgggttcagttaatgaaaactcagggaagggactggagggaactgttttcttctttggtatatccagactttaggctgataaggaacttcagagaatactgtgcattgcctagctttgagggtccttttcagttcaacatgcacaaagcactgtattttggggtgtcagtttctgagccccaacacactttttcacattttattgtgttacactggctgtggagttgatttgtcctatgtgcatacatccaaccagattattggcttttcttctttcctcgctccaggattctgtttttccaaatggtttgcttagtttcaaatttcccttttatgtgtttaaggaagaaacagttctcctggaccacagccatgaatgccttgactcattctgccttcgatgtatttcttttcacgtccttgaagcttttctttttgtgtggcagcaattccttgctgttatcttattttctgatttcttttgaagggataatgatggtggccaatttgtgcattttataatgttttaattcacgtgtgctcctactaaagctgatactggaaacaagtggtatgcacacctgagttgttctgattcagccttaaaatctgtttcccacgtgagtctgtatattgtggtgtcattagcttgtgtagctttttgttgtcattgtcatctcactcatagcaatacaaaaacattttcttttgacatatttatatccagtttcaaaactaccctatacttattcattaccaggtgatttaaagccttcctttgttgattttttttttgttaaccttggcttttagcagtccatggactttgcctaacctgcccccaggaagtgttgctttctcctttggttggggttgggggagtgctctggaggtgttggtggtgattatttcaggcagcccagtgtggcattagggagctggagtcaaaagttagaagggccttggtttccagtatagccccatcctggctgggtgacccagggcctgaggctccttctttgcaacttggggatgatagtaggttactgggaggcagctgtatcaaatgtgtgtgaaatgttgagcttatgccttccaaagagtgagtcccccataaatggtagctgttaacatgatgccaaggaaaaggttggtaaatccattgtatctgctccacagcatgagtcccttcctacaaattccacttctcccagttccttaagcataaataccatctatctaactatgccagttctcatgagcccaggctatttttgacctaaagtgctgtgccttgttacaatttcagcctttaaattccgggttttttatctgtggcttgttattttgggtcttggaccaacattattttacaagaagaatttggcaggacgtcttcagtttcctcagtttcactcctagtaacagaaatggtaggtagaacagtcacatttcaggactaggttgctgcccatccaggagcggttttatcaatctctgaaaaagctaactcctcgggcttttttaatggagtagttcactttggaagactattggctttggtgaattatcctgcccccacacttgcatcctgcagttacaaagcttccttacgagtttcatttttaggaaacgtctttacttctttagtgaaaaccatcatatatggtgatgatgctatttcaaaagttgatcaagggcctgagacaaatgctgtgtgatgggtgcggagtgctctacttcacgctcttctgattgctgctgaggcaacgttttcttaatttcactggtttctgtgtggttggattcctgcttctttgtcccctatatttatctttaacctcaagtgaatgttgctgcctttgtagttcatgagcaatgtatactcttgaattccagctctgtgaaatcggtagaaaatgaggtaaggataattttttaagaaggattaccttattcaaaaatattaccttatttccacggatctgtcatctgtttccatggaaatagaattaggagatggtttctgacgatcattttcaaggctggctcctgatcctcactccagtttccatagagatggaagcaaaactagcagaagacaaggtaaaaaggagtctgtaaagtagtaagctggagagcttccttgcagagaggagctgtccagacccttctctggaggttactatgtggtcagtttggtcatgaaccctcagtgatgctaagactcagggttagtactcagaaaatagcctttgccctaagatgagaagctctgctgttctcaacccttatttttgtcttttagagttggctttagatacggcttcagccctctggggtacctaccttggcctcctttctggagttgtctccaaggcagttgagataatcaggtattgattgcctagcgattttggtaactctggtctcccaaggtggacaggaagagagaagccagcatttgcctacccagagagtcagcctcctgagtctccacactggcagatgcctttggattttctgtgtgctttagtaagcagacacacgaagaaaaaggcgaagttgagtggcatcgtcaccaactgagctgtgctttgctgtttctgagggctgtcttggttgtttgcctggaaattatgaaattggctttatgcttttacttaaatccaaccagtctgcatctttaacagaacagttggtcagatgccgactaattgataccatcaacagaaataatctgtcaaaataaaaactgatgtcctttgaagaaagcagttttaaaataaataaggatgaaatgggatggatgaatgggattttcctcctttggatccagggcttttggttctgggctacagaggggcagagtctgggacacaaacagatgaggctgcctagtgaggagttggtttccagatctgtgaaaagcctctgtttggaaggcactataggtgacagccttgaagcttcatttgcatagcaaacttttttttttaaatttagcatctatattgatgtgagttggtggctgacagtacccagcactgcctctgcccacaccgtcaacctttttgggaggagaggggttagtagtggcttgaagccctaccttgagaggctgtacatagctcatcctgagaaggtcctgtgaccctcatcagaggcccagcacctttttgattttgaaagaggaaaaagggaaagagaaatagccatgaaagaatcttctttgctgaagattaaactgtttgactcaaagtaggaatgtgaccgcttgcatcgtctgtcagtacctcagaagttgcctgtggattactgacatgcagaaggatctggaaggctgggcctttgggcagtcttgctctcttctggctctcccagaagaagctccttctgcaggaattctgttgctactcttggggaacctttctcccatgatccagctagattcttgggtctgtcggtgattggctgagatgttatgttctaaggcagctgtctacgccctcatgcctcctgcccagtggtggaggaaacgcgtaattgggggaattttgctgggattccctgcgatggactgaatgcttatgttccctcaaaattcatatgttgaagcttaattcatatttatatgttaaaaccgaatttgtattcatatgttgaagcctaatcctcaatgtggtggtagttggagatgaggcctttgggagctaattaggtcagaaaggtggagccttcatggtaggattagtgcccttataagaagagagatctgtgaggacacaatgagaaggtggctatctacaaacccggaagcgagccctcaccaggaacagaattggccagcgacttgatcttgggctttgagcctccagaactgagacgtgtatgtctgtttttaagccacctaatctatggtattttgttatggcagcagaaactaagacatcttccaaaattcttcagcagggtctgtgggttgtggccggggctatcagtatgccttggaatttcttagccttaatttctgagaaggtttcattttttcttccttttttttttatttttgcattttatgtcttagctgatgttctttttttttggttttcttttgtcttttgccttttttttttttttgttaaaccttatttgggaagaaaaggaaaatcttccagaaatgtgagtgtaacatgatgaatgaccttagcttgatgtagtggctctacatttctgaaacccttgcccaacagtggcaggaggtgactggggtacgtgaggctttcagttggccaggtgggaaccatgctcaggcccatctgctgtgcacttgctttgtgacatgtgtgacaccaagtgcatgaccttgctttgtcctcacaacagcccgagaagtcagacgtagagtgggcacacaacaaagatctgtcgaccgagtgaatgagtgctaccatctgcatttcaaagataggaatctgaggctcatgactgatgtcagcccagctcccatagccaatgtcactgagatacatcaacctactactgaagctaaagtcccacttggacttcccttagtccaaggaggcccagagcacagagctgggattagtcagttctcccagctgccagccactgcccccagccccaatcattgttggtagctatatatgtagtttctgtcttgtcttcctttgaggctcaagtcatatattgctgcttcttctgagtcttctaagcaccatacctgtctcttgccctaacagacctggctgttgccctgctgatatcctgggatgtacttggtcagtgaccctagagttgggcatattgcatgcactaagcctgtacttgtctgctcaaccttccaccctgggcagcttttgagggtaagggctgtgtcttgctctctatatccagtaggggctcagtaaacatttgcaaaaggaggctacctgatagatgttaaccttcagtagatatctctgagctggtagaccatctggttgcccttgtcatgatgaataacaaaggcttcttagggttcctgccccccaccatatataacaggaggcttccctcttctctgtgactggtggatggttctagcctgagtggaaacagctgacactgagagtattcacccttcacttactgtgaaaaagggtttggttgcagggtcattaatcaagctgtcaggtagaacatgaaggtcttatttattatataaggaggcactttataaataaattgagctatggtgatgaatagatattggacaccaattatgttgctgctattaatcaagatactcatatttagcagtaacaacaaccatgaggggttgtaaaagtaaataaacttccctaaggatgaattgtaccattcagtgattaacctctcattatgaacattggctacttacaaattagacttgtagaaaagttagtaataaccctgcattcagacaataggtatgggtaggcataacataaggagacattacgaattatttttaagtaattccaaatatattcttgggtttaaaatgtatgtgcctgttaaaatctgccctaacatagacctccattagaaaatttaaagattttttttaagaggtcagagttaatgtgacttgcttcattttcacagctgacaggggcagagtcaggatttgaacccatcatctatacttaaaaaattttttgaggtgctttcacgtaaattatttcatttactttttaaacaattcttgcgagctggccaggttgcacatgcttcttattgaagaagtaatgggtcactggttgacataggctttggagttgattccctgttttggcccagttttcttgtgataggaccccctcatggcatgattataagagagaaatgaaaccgtgggtgtcctgggagagcctgacacataataagctgtcagaacacatgagctgtttttaaaattatatttataatggtttgaagcaaatacctcaatttggaagctggttttgatacttttaataatctagtgggcttgaaatgtcgataaatacacccttctgtaaatgtatttacaggcaacaatatttatcaaagttaggttttagattgccccagagctgaagttataaaataattttaatgcaaatacttgtgttttctatgctaggacttatgaaaaatgacagtgttttgggtaagccacttagcagtacagccttgtccaacactccctgagaactcatcagcattcagtaatcctgtcagaatggaaaaatctttttgctttaaatgagattttgcttgattggtatttttattttggaaatccaattttagctttttgtctcacttgataatgagttttttgataaatattgtcaccctttattgtaagcataaagaagaggtaacaaatggctttctgtaatgtgatactgtaataaataaaatcagatgccaggagtccgctcgtcactggcataaataaatgcattccttcctattgggcagatgggaacaggatgttgattctgagttggtaaaactttgattcccattcctttgaaaaatccaacgaatggctttattttcacatctaatgtttcttctgtagtctgaaacaaatgttactacgttatttgatttagagtgactatgttagataactctaccagttaatttggttgggttttactttgctgtggctgagtgctctgcacttgctgtggttggtggttgggaaagtgggccctgggcgatcacttcctctctgtgggtttccactgggatggcagaaactgcttatcatgccacaggctggaaaataaatcctggaagcaccatatagctcaagagacaatttgaaaataacaatcagagtcatgaatagaagccgatgcacaaattcagttaacaagcagaggaactaatctatcagacattgggtggaaagcctatttctgagtttatttcacagcacattatgacatttctttaaatcacaacttgtccccatgtaaaagatataatctacatattcctgtgggaaataatcagagacaaagctttactgtatttgtcgtttctgaagttgacctcattccccccccaaaatatttttcatgttgtgaaatgtaatttgcttgaccccaacaaaattggaataaaaaccatcacaattaccggtggttaagaaagtggaattgagtttgggagaattgaggcataaagaaaattttttttttttttttttctattcagaaaatatattgaaagaaatgcagagagacttcaaaattccatagtagtttgcacctaattctggttgatagggttttagtgtttggagtggtaagcagctgtggggtttgtggtggcctgccctcttgcaggctgagagggaactggggcctgtgaagaagaggtgacctgtttagtgtcacatagctgattggtggcagggttagatctgcatcctggcccatatacttgggtgctttttgccaacgcgcctttttcctttctaaaacttttactttcaggaagcccatagattaaaaaaaaaatctgtgtattgtgttctctcaatttctaggttcacatttgcctgagtttaataagagcctggctgggtacggtagctcacgcttgtaatcccagcactttgggaggctgaggcgggtggatcacctgaggtcagtagttccagaccagtctggccaacatggtgaaaccccgtctctactaaaaatacaaaaattagccggacatggtggcgcatgactgtaatcccagctactcgggaggctgaggcaggagaatcacttgaacctgggaggcagagtttgcagtgagctgagattgcgccactgcactcgagcctcagcaacaaaagcgaaactccgtctcaaaaaagaaaaaaaaaaaaaaaaaaaaaaaaaaaagaagagccttacttcctttcatttgaagcaaagtggaattaccttgactgtggaatcaaaaagcaggaatcatctgctttttccatggcatgcattccggtgcatttgtgatggtctttttcaatgagacacagctgtcccaggtcaagcttgaaggcagggtaattgtcatgagcacaagcacatgttgttttctatctctttgagtgcaggaaataagtactcttacagagttgggaaaacagagtgatcagagattcaggctgattggggaaagctggagccctagaggttctgtcggaacatttggcgcacacttgacaaacccttcaggctgtgcgctgcctctggtcattgctgcagccccagactacaggtaggcaatgtttatataattgagtgaatagtagccacttcctatgtgtgttcacttactctgtgctaaggccttaagccctcccccatcctcccatcaccaattttagaggcatagaaatgaagtattagagagtctgggtcatttgcccaagatcatgagcttagagtcctgaggtctgggtttgaacccaggctgtgcttagcattggctataggagaaaaggacatttgtctccccaatccccagagcatacataggccttagtgcagcccctacctcatctttcccttgccttcatggctggctgacatgtgaaatgggccatcccatggggaagtactttatggtttatgtgggttattatcatactcgatggcattgaatccatttggggacatgaggttcttcagttcttatctcttcttggtttgcatttctttgttttttctttgattcagagtagttaatgtgggtgaaatggagggaggttgcctctggaactgaaattctggagttttctggagcaaacaatggaatgttgcaatgtttatctctgtcagcaacattctgaggtgagagccccaaccatttctagtattagcgagggtaatgacttcttagtgaccagggacgtaggctaggtagggaagcccttacgggaggattcatttggcgttgtgtgactaccccaaaggtctgagccaaaggtcctgtgccttagaagtgggaggggtttgtgtatgtttcctgtaagttctgttcataaatgctgaaattcttctgttgacaggatagtaatgaacccattggttagaaggttgaagtaatggaaaaacctgtttcaataccataagttgtgattgttgtacttttcagattgcagttcttctaaatggcttatagaagtttccaagctctgctttgccctgacacataagctctttagggtacaaaaagaaatacttacatcagaattgaactttttttttctggcagaagaggagcttttggaacacaaaaagattttggagcaaagaattttgagaaattctactttaattttttcccaagtatttgcacattaagggctcttagaagtccttaaaaagaagcctgcttaattttaccctggcatctctcaaacttatttaagatccaaaattttaatttgtctgcagcacacttctagaatggggctttagatttttagaggtcagtaacatgacatctaaaggttaaattatgtttattcacgaacatattattctatagattcaacactaaatcctgtagaccaaaggatcaacacattttttctttaaagggccaggtagtaaatattttgggctctctaggtctctgttacaaatactcgactctgctgttgttgtgtgaaagcagccatagacaatattaaatgatggacatgactgtgttctaataaaactttatttacaaaaacaagcagcagttggattaggcttgcaggtcatagtttgccaatcctgtgttagatctgatgacctggtctgctgatcacactgctgcacattccctgctgttcctctggaggtaatgcatacctcctcctttgattcaataacccctactcagcctccctaacttgccttaagcatctctccctcagaggttttcttgcattccaggacagcatgtggtttgctctcccatcctcccccagatctctattgtatcctctgttccagccctaagcaactgtgctgccatcactcctttctttaccagtcctggcaccaactttgagctcttggagggcagagaccttattactagtctgtatctccagccctgaggatgggaatgagggtgaggatggtgtacccagcaagttgcagacactcactgtgagcttggtgaatgaatatgatgttgcaataacttgatacagtgttgtgttgtgttttgcttggatgaaattttagagttaatagtaagtatagcaggaggaagtgttcttttcaaatagtaattttaagtatccccaaagacacagatcggttgggtgaatctaggggtgaattccacatcctcccaagatatatgcatcttgggtgaagaaagaaagaaatgaggctagtgtgcactgtggtaaattatgcatgtaaaacagaaaagctgggtgaaaatgataatttagggggcattggggaagtatttgaaagatctgaaggtgtatttttctccttctttctttactttttagagattaagtgatatagacctttttctcttttcacccaggcctttacaatattttttctggtaatttctcttcatactacatgactgctctaattacatctctagttttaagataatagaactgcattttttaatgtgctctctgctgtgtctggatttatgatatctctccttccttatgtcttctgaaaaaaaaaattaactgagttaatattaaaataaagtgggtgaattaaatgggaatgagaccttaaaatctgagatccaacccaaaatgctcaccaacggcaggcctctccatctctgaagccaggacagcgttgctcctgccttcctccataatgggaagccctgccaagctccaggtgtggccatgaccctgagttggcctagtgaggagggaaaggaaaggctggcctgatgttcccagaggtctgaatgccattcatctacaagagacactgtgaccactttttctgagtctgctgctgggaatcagataatctctcggcattttgggctcctgctgctgctgtccctgggagtgctgtaggacgcggtgactttcagagtcttgcagggagagcaggtcctgtgttgatgccattgctgatgaacggggtgaccttggaagagtcacttgacatcttggccttcagcctccagatgactgtatctgtgtctggagggattgataggcctcctgggctgtcttagatgttagcaaataaaacttaatatactcggttgaataccaccaagtctgtctcttgctttgatctcatagcaactgggtagacagaaactacagagattttaaaggcttgacaattgaaataattgaacaccgcacttgtgttcttaattttgttaaaatacaggccctttcttcaaggagagcacatctgaataaaggaagtagacacacaaacccagaactgcagggctggagggtaatgggatctatgaagcactgtggggtgtggaggaaggcatcgctagttgtctgtctggaatggggactggcagtcaggaagggcttcccgggtgagctcatgattgactagggcagcagtccccaacctttatggcaccagggaccagtgttgtggaagacaaattttccatggatagaaggggtacagggatggtttcaggatgaaactgttccgtctcagatcatcaggcattagttagattctcataaggagcgtgcaacctgaatccctcgcatgcacagttcacaatagggctcatgctgctatgagaatctaatgccaccgctgccactgatctgacagaggtggagctcaggtggtaatgctcacttgcccctgctctgtggccgggttcctaacaggccacagaccagtaccgtggtccgtggtccgggggttgggtgtttaaggatgacctgatgtttatcatacagggagggagggtgccaggcactcttatcaaagagagtcgaactccaaaataactgtcaggtccacagacagagcatcaggggatcaacatgggtatgtgctcccccaaccagctgctcagaacactctaatctagctgtggaacatatgtacacagaactcattgtatagactgttaagcgtaggtcatggttgtgctttttccatcttttctattgcaactcactgttatcaatttagaaagggagaacttaaaaacaaacaaacaaacaaacaaacaaacaaacaaacaaacaaaaaaaccagtagcaggagaggctgtgcaggaattaccctgtagggatagcacagctgaggagagctgtaatgattcagcaccaaggacagcgacatgcaacctgtccagcttcaggacctgtaaatccttccttggtggttcatgggtgctgaatgttgtaagaatagcgttctcggcagagtctgtgttcatgatgtcctcaggactgcacccatgccatgcttgaccagcctaggctacgacacctcttgactggtggccaggtgcctcagagtccatgtattcctgtgatagaccacttggagttggaatccaaccatagggttgctcctgctgttggagcaaatgggaggccatgtttgctgggtttcctgccagagaattgcttcacggctgtagtttactgtcggctccttcatatagaagagattttcatgagtttttcaggtcaaagataatgaacacagggccccttctctaatagatccacaaaccccaaacttccaaaatggatatatatttattttgcttatcattagaatggcattagtggtgatattagctgccaaattctgtggaatatagagcgtcactcatttagtacttggcagacccctctgataccatttgtggtgtttgtccccagcaactcaggataatggatttggcctttgactgactttgacaagttgatggaattttccccacctcactcctgcaatacatccagcctgagtcaaaagtgaagccatggcatctaagcctcaggcacaactctgcatattttattacaagcatgagctaaagtaacccctgcttgagggaaatgagggctgaaatttattgaagcaattcttggacttcgtggttataaatcccaatcttttcatttctacttggccagggtattgaccagcaagcttttatgtaagaacttagttcctagcgggacccagtgtggggagtcatatttgcttggatagtcatagctgaaaggattaagaagaggcttcccatgagaccagctcactgatactgtgtgtggcatctctgactgtgaaagggcttgggtgttccatccattaattaaggtgcataactctcctccatggtagatagtcttaccttaagaccatttagggacagggccaaagtcgagcacaaaggcagaaagtggtcctgtggctctccagacaagtttattccttgctatcccatccttccatgtcctttgagatctagagcccaggaggtaggacggcagggtcatcaccatgtggtgctagttgaatatgctgtgtgaggtggaacagactggcaagctgggcttctcgggacgtaggattggcaaattgctgggatgaggggtgcttcttgcctagcttcaggaggaagttgtctggagttctgacagtttggagaggtctgctgggagttccttcccactggattgggcaccattcaccagaggcctgatctcagcagtcagatcccacacacaggcctatcttccccatcagctacaattcaaacgtgttgtgccttcaccttagattgtttacaaaaggagttgttttcttatgtcattaaagttaatgagtacacataattttctactttttaaactttaagcatcaccacccattctcataaatgctgtttgcccagttgtcttagtctatttgggctgctgtaacaaaatgccacagactgagtagcttataaacaacagaaatttatttgtcccagttctgaaagtccgagatcaagggagggcctgtttcctagttcattgatggagctttctagttgtgtcctcactgtggaaggaatgagctagctcttcagggcctcttttataagggcactgattttattcctatgggtggagccctcatgatctaatcatcctccaaaggccctgcttcctaataccatcactttgggagtaaggaatttgacatgaatttcgggggcacacacacatttaggccatgctacagtattccttactggaagcagggttattagaaagtgtcaatggcaggtgaggtgaggtacccagaaagggtgaatgtttcttaaatctgctttcctctgtagaagggagagagaatggaagaacacaagtttaggacctactgatggtggctaaaaggttgtgctctaggtgagtggtgtctcaccctgccaccagcacacacaccactttccaccttccccaaattgagagttttaaaaccttacatcattgtacgtttgatttttagccccagctgaaatctctaagcatgtcactatcagagtttctgtctatagagacctttggacatgaatcttaaatactcctgctgttgtgccttcccatctctttcactttgatgccattggcagtgagccattttgcttccagagaaagtaaatctctttttttcaatctctccttataagattataagtaaaatactccagatacattttacaaacattagttgcaactgcagaagtgtcgagatccactagacagaacacagggtgttggggtctgtagagctgaattctaattctgactctgctccctagtggccatgtgatcttggataaaagacttaacctcgttgggcctctgttttctcatctgtaaaatggggctatctgtctggaaacaaaaaaaggacccccgccccagaactgtcataaagatgaagtgggataataccagaacctgccatcatatatggtgttgaattgctacttgatcaatgtaggtggaagcaaaaaaaaaaaaaaaaaagtgcctttcttgagttggatttgttttaatcagtcacgataaacccactcaaagaaagttttgaagaactcgtatgaggccaaaacacattcctgctccggggaaatggaggttaaccctgaagcttagatgcagcagccttttctattcactaaaagagaagcagaagtggagtggtctcaacaagcagggacagtgttctgggacaaacatgtaatcttcagtggttttttgtgatggcagatcacatcagattaatgattttaaaatgagtatttttctgccttctggccatatttaatgttctaatgccttttcttttaaaacatcaacatcatcatcatcatcatcatcatcatcatcatcatcatatctaatttagtgttttcagtttcatacgcatgctgagcagtccaaacccttaaatggatttgtaatctagtacccagggagtgccttggaatgccatgggctgttttttgtctgtgttttcaagttgaaccgaccgagtacaaggaaatcggtgatacagtctcttctcatgcttgtgcctggtgctgggagtggcaaattcagcctccctcatggacaggttggctttgaagagctgagcttggtgttaggcagggctgggtttgggtgtcagggccatgcaattggggcaagttctgtaacttcttctggcctctcttttctgatgtttgggaataatgatagataaggagccctacctgcgcagggctgccgtgaagagagaatgtacacagagcccagatccggtagtcaatgaagggccccaaaagcgttagctgttgctgttgttgattatattgcataacaacaccaaatccactgtgtctcccctgaaccgggaagtggggggattctgaggatgcattggcattgaggcggtttgtttggaggaggtttgggtttatttgggacctgccagctgccttctagcacattcatggtctccctgcaagttttctttagaatgtcttgtgccatcaataatgaggaaacctgggatgcagtgctttttttttttttttctttttaattccctgtcagtcagcagtgccaagtgaatcaagagtgggtggtccttcatcctcccacttccagaaagttcttttaatgactgcttgggggtggaggagaagacttttatttttaacacaagtgatgtgttttgacaagaatatatcactgtggagagtttatgctaaaggggaagtgcttgcagttacaaacggagcttgcctttccttctgcaaacagggcattgatattgagtttcaccatgcaacatgcaggtgacaacacataattgagacaggagtggtgtgacatgcacagtattctttggtgtaaatgtgaaaaccatagcagtagccaaacagacccttgggttattgaaaacccagacacctaagggggaagatagttgtccacagagagtacatgctgtagagcattggagcttcagggtcttgggcagatgactcttctctgagtctgtttttttctcctgtaaagcagggaatgagcacgagagccatgaagtggtctcagctccctacatgcttttcccatatgtgaggtgtgtgtgtgtgtgtgtgtgtgtttgtgtattcacgccatgctgctgtagattattctctggggacaatcagtgctgccctccaggtatctcagcccagcaaatgaaccaggggttactaatggcactgcagctggtgcaagggaaagtgacttcaaatggagcaggtattatggagctagcagagctgctcattcctcagggagaatcagatcatgtaggagacccatgacggggaggaagaatttaagaattacgacagcagtgaaataatgttaaccgcagcccagcacaggctatccttcaaatgtcttttcccccatacctgggatgaggaggctattcatgattatagtttttcagcatgtaaccttggccaggcgctctgctaaatgattcacatttaatcctcacaagaacccttggagaagggaacttttgttatcgaaccccttttacaggtgaaggcatgaagctctcatggtgaagtgatacttcccagttatgtggtgagttggaacctggtttcagcccaggtggtgggactttatgtccctattccttagagtccatggctatggctgtgggatgattgaggctgctccaggtgacccagcagcagagtcatgctgtgaccaattactcagtaaacaaaagcaggcagagggctttttgctcattttcttgcaaattgcatgttgtagccagttctttttccagggttcagtctttttggaattagctagagcttctcctctgtctctgacagtggcattggatactatcataatagtaaacatttgaattctaattaccaggtgcttgctaaaatattttcaaacattatctcatttaatcttcataactgccccattaagcaggcactatgattatttctagtttctagatgaggaaaaaaggagtcactttcctgaggtcttgggaccagtgggtggctatctaacctgggcagcctatccctagagctctcactgaggaccactaggctgtgccagtctcaggagggacccccagcctggatgagtttgttgcaggaagaatattctccttcgaggctgaattacaatgtgttgttgttgagagtgtcagctccatggcctgagagacctaggttctaattcatttccttcacttatggaccatgtggcagtgggcaagtcattgcttctctgtgcctcaattttctcacctgcaaaatgggaagaacactatctgcctcactgggatgttgagagctcagggtctggcccatagttggttctcaaacatggaagctgtcagaaaaacaaatgttgcatgttctcagtcatatgtggaagctaaaaacaaattgacctcgtggagatagagagtagaatggtagatacgagggggcgggaagggtgtgtgagtggtggtgggggataaagagaggttggttaatgggtacaaacatacaattaaaaggaatatgttctaatgttaggagagtagggtgactatagttagcaacaatgtgttgtatatttcagaatagctagaagatagggcttgaaatgttcccaacacatagaaataataaatatgcaagaagatggatacccctgatagcctgacttgatccttacacattctatgcatggaacaaaatgttacctttatcccataaaatgtgtaaatatgacgtgtcgattaaaagtagttaaaaaaagtcataattgagaagcagggacatgatgatgggaccatttcataatggccaaagtcagaaaccagccccagttctccctctttcctgtctcccacctccttgtctttccaaaattctctctggaatcttcctcctggctgttccttcctcttgtcttgattaccatgtggatggggcctgtcttagtctggctctgctgctataacaaaatacccgagactgggtaatttatgaagaacatgaatttattttctcatagttctagaggctgggaagtccaagattaaggcactggcaggtttggtttcacgtgaagatgcgttcctcatagatggcactgactaggtgtcctcacatggtggaaatgtggaagagagtgaacccactccctcaagcccttttataagggctctcatcccatcctgagggcaaagccctcatgatttaatcacctcctaaagtacccacctcttaatactatcacaatggccattacattccaatacatggatttggggggacacatttagaccatagtagggccctcaacacttaggtcttctgtgaaagggcctcctgcctggcttttctctcgccggttgtacctactctgatctttctcacatggccacccatccaacgtggtcactcccatgctaagtcttacatgataacctgtcaattacagccagcccttgaacctcggagggcatccaaattatttgagggaggtttcctaatatgcacattccagagtcccgcctcccagaggtccaaatcatttggtctgggttaggcccaggaatcagccgtctggccgttgtcccagggcattctgatgcatgtgatctggaggaaaactctgactcctaagaatcaagtccaagttccttaacatgcctccccaccctggcttatttctgcgtctgtgcctttgctagaccactgaccatcagctctgtccaaagctcactcccacccatctctgctttcctttacacctggctactctgcattaagctttagctcaaagagagtctgacacagagatgcaatgatagacacaagcatcatgttatgtaatatttattgaaggtgtaggtgtggtggtcaaaacttttacagtattaaggcattaccttctcatagccatgtgaagttgatgcagttatagtccccacttttgtaaatgtggaaagtggggtacaaggaggttgagtaaggtgcccaaggtcctgtggggctagtgagctgaagaagctgctcaggtagtccaggtctagggagacgtggggatggtgatggtggcaacatttctttggacttttgtggtgcagcgttgggttttcacaggtttggtggacaccgttggtgtttaatgtccaggctgagggatgtcaagcatccttcagtgtgtacagcagccctgcttgtggggaattgtcccacacccctcatgagcagcagagatcctgctggacatttatgcaagtgaaaaccctgttcataattatttgaagctagaacctaatctaaacacacattttacaatttcatacttttaataaacactgaattttccaggagcacgactgccattgatcattgagttagtgtgttggaggagtcacatcaccgaggacaatgttggtggccatcaagatatgcttgtgtggttggcatttgtagctgttgaattttcctgatgctctgtagaggtggaagcatctgactgttttgccatgcctttcagtatcattatgcctaagcatttgtctactgaaatacgtattactttattctaaaccatttgcctttgattctcttttatattataggttggacatactattgattttaaaaaatattatatgttgatattatctaacttttatttcaggatagtaaagaagatgtcacaaagtgattggttaaaaaggcagtcttcatcagatgaagaaccactctgtacaaaataaggcctcttaaggggcaggagggcagtgagttctgggaaagacacctgatggatggatcttcacagggaagccgttaagttaaaacttgagtctggaaagcctttgctagaccccagcttgcctcctgcccacgtcacagccctcccagttctctttgagatgttaatttgttgctatgaaaattatcttgtcactgacaaacggaatctggaagaatcagctcttcttataaagtggttcctatggtatatgcagggctttgtcagtttgcaagttatgaatatttatgtttcagaaaagagtcctcatttaaattgcgttttctgtaatttcccacttaatttcacatagaaaataatgacatttccaggctttgcctaggtgaatgtctttggagatggcaatttttgcacatgggctcaaggggcattggaatttactgaattccaaatgcagatgcagttctgctgccctgcagttgcttctatgtaagataatgcatgcgtccgatacattatcgacggaagataaatgccagacatgattatggtaaattagaccttttgcattatttatgagatccaatgtaaaacgtgttttactttcccccactaatgtttatataaaagctataataggacttttagtaaacaattttaaaatttattacacaaagggacaaagtttttcttaaattttatcttcaagatttaaattttttaaagagattgcatctctgtttgttgtccaggttggttttgagctcctgagcccaagtaatgcaatgctcctgcctcatcctcctgagcaggaaagggccaagttttaaaaagctgttctagtctcagttgtcgctgtctccttccatcagctcttcaagcagaaaagcagaactatggaaaatgtcatgggacatgtattgggtgggcctgagaagggccttggagaagtcgaggcttgggggatggcaggaaatgtcttcctcgtgacctcaagtctgctgccataatatttaagcatctgtaggaacatgctgacagcctacttcaagtcctcctctcctttcagttttcaggaaactgtgtactgcctgacttcagtgtgggtccacctctggcatctttatagtagcagaacttattcgaagtgagttttaatttttatttttggtaccatcttctttctctggtttggtactgatctcttgagggaagccgggaggatgacttgcaggtaaaattccttccctgagccgtgtgtgttggtttctcacagccagtcatcataatatctcacacttgtttaggaacttggcaccttttgggaactgctcttgtgtatgagggcctttgatctgcaggcggctgggagctgctgtcttgtgagctgttacagtctgtgaggggaactgagtggaacagtcgcctatcctttccatattcttctctccattttttggttttctgcacgttctttgaaggctacgtctgaaattcctccttccccatttcctatctccaacctgaagttaaaagtttctagctttggggtgttagagaccacttgggagctgctttctctgtgaggtgaagcatctctgctggggctttgattaggaaggtgatgttgtatgtgtctttggacgtgatgaaagtaaaaatagcatgcgtgaagttccaaggaaagtgagagtcagaggccagactgctgccttgttcttatcagacttttctttttttcaccttaaaagatctaaaaggctggttctgttctttacttgtgcataacaaggacgggagcaaaccactgtctttgtgtgtcttgtctttgtaatacctaaaagagcccccatcctctaataggctccttgtggctctgcctatctgaggacaagaggcctgacacagtgaacccgccattgcctgcaaggcctgactcctgtgtgccaacttgggctttctaagggcagtttcatgtatcttgaaccttcttctaggagctacctagggacaacagcctgatgtgaggccagagcctctggcttcccgtggccccgaatatttccgtataccagctggggtctcttggccaggctacctcaatagagtattgatgggccagccgctctgtggggctctgttcatttgtaccatttgcccactttttatgcttcagttccagtatgtttggacaatgaaattaaattggtcaatttttagcacatcaaatggctttgttctcctgctttggcactgagcctcgtgtggaattgtttaaaaggaagacactcagcttgggagcactgtgggattcaaggtttcatatctgtggattctaggccatgccactgtccctcaggccccggggggttactgcctctctgggtttgcctggtggcgtccttgcagccccaggctttagccagacctccctgcagctagacgctgagtgcacaggtctggtcggcacaggccattctcaaaagcctttgttcttccacggatttttctgtgctgagtgatggccgtggccgggagctcctagatgtcttgctccttaacgtttgttgtggaaaagaaggctgctggcctgaggacatttattccatttcttttcttcctgtccctatcccttttcttttctcatcatttctttcttataaaccccttatttctggccttcacttcttgttttccttcttcaccttctccttgactctcctcctaaggctaatgattgtatgccctatttcagtataattttctttcaacaatttttattttattacatctttaaacatatacaaaatatagactaataaaacacccaaattcagtagttactaactctttggcaaatctggtttcctctgtatccccactgccctcctaccctgtccctgtgtagttttgaagcagttctaagtcatcttgtcatcttacctctcaatatttcggtctacctctctaaaagaggactctttcttgctttctctttttaaaaattttatttatttatttttgagacagggtcttaccatcacccaggctggagtgcagtggtgtggtcttggatcactgcaacccctacgtgccaggctcaagcgatccccagcctcctgagtagccgagaccacaggcacgtgctacccgtcccctccgcctcccgccactaatttttttatttttttttgtagagacagggttttgccatgttccccaggctgtcctagaactcctattttcttcttttttagatgagagaatcttaagggagaacatcctagagcctttgctcttcagaggcccttaatggtcattgaaagaacatttatccaagtgcagcacatgaggtgatagcatgcaattgttaaaaatagtattttgtgtttgtttccctgaatacactagattttatggcaaattatgttggtattccatgtatgatattaacactaggtaaagaaagggagtcaattttaaaataaaaatatttgataaatacaatatttgcaggggtcagaaaactgtgatctcagggtcaaatccagcccactgcctctgttttagtaaataaagttttattggaacacagcctctcatttgtgtgtgagctaggtatgactgcttttgtgctatcctggcagagttgagcagtgggatggagattggcctacaaagtggaaactatttaatatctggccctttataggaaaaggtttacctgtggaatcggaggtatgtggacagagcagataccatgaccttggcacatcagtggctgaagtctggaaaattccaatcagacccaacctcttgctttgtagctgatgtagctgagatccaggcaagggaggaggttgcccctggttacacagctagtgggtggttgggtgggtagtccatcctgaagtccccagtgccatgcccaggctctgtgttaacatatctgagtgttgcagattgggtttagacctcatgctgggtagctgttccagagcagaaataatttgtggttttcagtaatttctcacaaaatgctctattaagtttctgttgccccagccccttaaattattacaccaactaggagaaaagtaatttcaaagaagtaaggagaatatttgtgaagtggaataatttaccatcaaataaaatacaccgagtgcctcctaacatagaatgctgagctgatttttctctgtggtatcagttccatctccagctttagtggtggatatccagctgggaggaaagcatcaaggtaaaataaaatgcaaacgatctctagcatatatttgtgattttctcatttcagcatccattcctgctgtaattgccagagtaggaacaaagctgcagggagaactgttctagggtattgcatttcatagcatttgattacttaggattgaatagctttgagattatattgaccctgtagacttgtctcctgtttccctattttctaaacattttagacaagtgctttggaaaataggaacttttttgttgttgttgagattttaagatgaaaatatttctttatggttcaaaattgttattgttatattttgtgggagaagcaacttgctgaaatgatcctgtggtttacttagaactgcattgtccaatgtgatagccactgagccacacataatgctactgagcacctgagagtgtgtggccggtctgaaatgagacgctctgtaaatgtgaaataagcgctgggttttggtgacatagtacagcaaaacgaatgtgaaatctttcataatttcggaatactgattatatgttgaaatcacgttttgtatatattggattaaaccacatatatcattggaattattttcacctgtttccttttaccttttaaagcagctaccagaaaatttgaaattacacattatagttagcattatatatacttcgaaaagtgctgaatattgagatgagataattaaagaaattttaaacaattagagccatgatgggaaagcttggcttatttgaataagaatattgctctaatgttggaagttacggtaacaaaagaagtatagcattaactcaagaattattgattgatggaaagaacatttcacgtagactccaacccttatgggtcgtgttcagtaaatgtttacacctttaggtgtcctcaaatcacttatagggaattgtaagattatttagtaaatagtctacaactgactatttggtagaagatttgagtttgaacctcattttatattataccccaaataaattccagatagattaagaaaataaatgtaaggaatgaaattatcgaaagactgtatcatcatctagccaaatgtgtatttgattttcaatttaaaagcaatagaagaaactgtaaaggaaaaaattgaattgacaacagagaaatcgtttcattctttaaaataaatttgataaaataagttggacaaaggtataaaaacagggaactcatcccagcaattcctgaccccttgaccatatccagttcagaaaatgacatttaatgcacatcagaactctgtgaattcaaaagaattaatgaacagttttctgttcattaatggggttgccagattaaagaaattaaactatggggcactcagttaaatttgaatttcagataaataacacataattttggatataaacatgtgccatgcaatatttgggacatactcttaatagaaaatactgttgtttatatgaaattcacatgtaattgggctcctgtgttttatctggcacccctagcctgggaatccaccctacaacgtgcagaacgggaagggaagcgtgggagttgaatagtcatgtgactgcacttggtgcagaagggacctgggaccagctgccctgaaaataggcattcaaccaattgtcccctttgaccctgcaactcactgctggtttctgaaatgtggggcacctctgtgtcctaagcctgttcaggattctgtgagctcatctggctgtctcacgctgcaggcagttagactggaagaatccagccccaagtcccagttaccacgtcttcttcatgccatcttctaaaatgcatgaatcttgtttgttgcagttgcttccccattccttatactgtgagttgatatacccattttcttccttcactgttttttaaaatgtcattttagggagaggagagaagtgcttgtggtctatttactatgattaatagaaaggcagccttaatcaggacacatattttaattatccagttaatgcatggattcattttggttgaaagagaaacaatgtatacaaagtgagagttctgttgattccccagttcctggcaaaaaaacccaggaaactggggataatagacataggtaagaagaccatatatgtcccaggagagtcctggtttatgtctgatgtcctgaaagttattaatagttattaattgtagttatcagtagtgtcccttctctccccactacttgactctccaaagagtccatgtttggagaggaaattctgctgtcaagcaaggcttaggggagagtgtatgttaagtgcagaaagtgaactcaccgggtcagggttgggaggatttttctctggagaaaacgactgtgtctggggatcatggctggtgacacacatgtagagcttctagtcagctttgggtgctatcagctgcatgtcagcccgactggccacgtggtacccagataagcattatttctgcatgtgtctttgacagggtttttggatgagattagcatttgaatcagtggactcagtaaagtagatggctctccccaatgtgggtgggcaccatccaatcctttgaaagcctgaacagaacaaaatgaaacgggaagggtccccttgtccccctcgcagggcgtgcgatgggggtgtggctcgcttcttcactgccttgttgctcaaacctctaggggagcatacagatgggcaggctgtggggctctgactccatggcggtgtctaggggtgaatgtttacagctcctgaagcccttgtgggtgtgtgttacagggtgctcctttagtttgtcatctgtaggcagcttgtgttagctcagttagaccctctaccttgttgcaaggacaaagggctttctgtatcccgggttcttgccttggtatactggaagaatctgatcacacatgagcttggaaaatgagggcaaagttttattgagtggaagcagctctccgctgatggggaagccagaagggagatggttttcctctggagttgggccactgtgtggccccagttctccttcaactccctcggccaaactccgtctcatcccgctggtcagtggcctgcctgtgtgctggcatctgtcggtgtgctgttctgccgacgtgcttcctcgatgtcctctcgctgtccggccgcttgtgtcttcttccgctgatgtgcctcttgacgtctggctgcctgcgtgtctgcttgctagggtctcagatttttataggcccatgacaggggtatggcgggctagggtcgtcttggaaaatgcaacatttgggcgcgaaagcaagagtgcctgtcctcacctaggtccctgggagtgggaccctagccagggacccgcccttctctactgtgcacttcctgcctgctcctgtatccaaaagacagaataaggaggaactcacaccttttttcttgcctcaccctttgagctgagacatctcataccattttctttggcccttggattgggatttctaccattgggtcctctgattctcgggtctccagacttggtccgaattaccccaccagcttttctgggtctctgctttatagatggcagattgtgggactgctcagcctccataatcacatgagccaattcctcataataaatctccatatatatatacacatacacattcacatatgtatggaaatatatgtgtgtgtgtgtatataccatatatataaccatatgtatatggctctgtttctgttttccggagaaccttggctaatataagtgcccagtcctatgtgcacaaacatcaaggataaccagaccttgaggaaagccacgaatgtgaaagagagaggtgaaaacaatcagaaaaaaggaattccagggaaatggagacatggggccaggcacggtggctcacgcctgtaatcccagcactttgggaggccaaggtgggcggatcacgaggtcaggagttcaagaccagcctggctaacatggtgaaaccctgtctctactaaaaatacaaaaaattagctggatgtggtggcacatgcctgtaatcccagctacttgggaggctgaggcaggagaatcgcttgaacccgggaggtggaggttgcagtgagccaagatcgcagcattgcactccagcctgggtgacagagcaagatgctgtcttgaaaaaaaaaaaaaaaaaaaaaaaagaaaaagcaaaacaaaagaaatggagacatggaagaggagaaaaaaatggaaaaacttaccatctcctcaaagatgaaagaatatattgcaggtaaaaaacaagaacagaaagttttttagaaaaaaacatagagaataagaaaaaggacttggaaatgaaaagtgattgccattataaaaaatccagtagatggtctggagataaagttaagaacattccccataagtagaataaaataatgaagacatggagttaggtaaaagatgaataggaagccaggagattgatctaggtggcatgacacctgactaaccacggctacgtgaggataacaatagaggggggaaagttatcacagatataaaaagcagccttccagaacagatggaatgtcaagatggggaggactcacctagtgtaatgggggatgggattttttttgttttttatggtagagacggggtttcaccatattggccaggctggtctcgaactcctgacctcaggtgatccacccgccttggcctcccaaagtgctgggattacaggtgtgatccactgcacccagctgcaagtgaaaatttaaagcagctcataacgctaagaaaagcaaagttgtacaaggaaggaaatataactatggcctactccctggcttagcaacgaaaatgtgtttatggccagtgtttacattattgaatgttttgaaaattatgataactctgttggggagatggagggagaggaagtagggcattgttgtgagagctaaaccttcatttaccacaatgggcatcacttgataatgcctataattgatgataagccatattaacattcttgatatttagcaacttggaggcagacaccaaggtaaagagcaaaaagagttgaaagtagtccctctggggctggaatggggtgatgctgagtcggggaggaaggcacagaaagggaggtaagaaagggttgcggtggaggatgtcctcttgtattaaacagtcaatgtagtttatgttagggttgccagataagatgcaggatgcctacctagttaaatttgaacttcagataaacagtgaatatttaaaattgtaagtacgctcatgtgatatttgggatgtacttacatcaaaaatatatctggtgtttatttgaagtttaaatgtaactgggcaccctgtattggttgcttaatcgatttggcaagcctgtgttatatgtatgtattaccttgatgaaaataaatagaatgtataattatttatacatagaaaacgttcgaagatggtgcaccttagttgtgggcacttcttgggtacttcattgggaaaggggagtggtctcattctcttttcgcatttctagaaatgttctgctgcaagcatatattaatgtaaaagtaaagaaagagtcctagaaattctgaacaatgacagtgctggctgagggtcctgaggctatgagacactgagaaacggtggctctgtctgtatgctcggggatgaggtcaaacaggtttaacccaggggaaaattttgagctgagctcagattattatgaggttagaagactaaaactctattgagatggtgtttaaaagagttctagagactctgtgtcctgggaggaaggtctcattactactggcttttccaaattataatggttctctccctcacacgcattctcctgaggcatattgatcagccttaaaaactcaaacagtgaaaccctgccgcgacccaaccttgagagggtgaggctaatgctaagctatgtagcagccatgttgcactaagctataccagtaagcttagtttggtatactggtgagctatactagtaggcttacttttatgccagtaagctataccagtaagcttggggtttttatttccttcctgcatttccttttcctgtttcctttatttagggatttggctacttctgataaatgaagattcatataatagctgaattagtcagggtaactaactctggctgttgaaacaacccctaaatttcaggaacttaacataatacataatttatttcttggtcatgactatctgatgcagttctcttccaaggagtgacttggggacctgggtccctctcatctgtaggctccattcttccctagggacttcctatagcccctgacagggcatactctgccagtcagccatgaacagtgactagacacagggtaggtgataatgtggtaggagtcaggcctgcttctgctgccactcactggccagaatcccttcatctggccttaacttcactgcagaggaggctgggaaatgtagtcttcttgggtgctcagatagaatgggccttctaggcagtgtctgccacaagagctaatatgtgctgagtgctaattgtatgcatggcaacaaattaatttacatgtacagtctcactaatgctgggagacgtgtgctagggtcttcatcttcctcaccagaaaagtgaagctcagagatattgccacttgccaaggtcacacagctagcaagtggcagagctgggcttgcccgtgacctggaaccactgtgtcctctgtgtgatttgacaccactgtaatccgggtggatacattatgcttttaagaccatttaagaccaagttgaaaatctctcttggacttattggtaggtattttttcatgttgtacctgaggcttggagggatacatttctctcccttgcacaaacccactgctaaccttcctggatgaatggatgttggtgtaagattccaggtagcagtcttccaagccagcagagaggagaaatgtgcatttgtctgagttacctcgggaatgtcacggactgggctctgtgcacattccaccatatggggagtgggccatggagcgtggtcactagggagtgaggagggtgcttatggcaggaggggaaagtgatgaatctcttctctgtgtcacttcatcatgggagccacgagatagggccgcttgtcagcaagcatttccacaagattactttggattagctatctcggtgcatctattctcatgacacttatccattatccagaaaagtgatctacagcccagctggctgagtgactgcctcagtgtgaatccacatcccctgccactcgagtccagtgattcatgtcccctttggaagtttgaacagctcagtgttgtcgatttgattttgtgatacatttcttacttttctaaaatgggtgagtagtgagtgtgttctggtgctctgtttgttgtttgatcttgttcatggaactgcctttctttttgagatggagttttgctcttgttgcccaggctggagtgcaatggtgcgatctcggctcactgcaacctctgcctcctgggttcaagtgattctcctgccttaacctcctgagtagctgggattacaggcttctgccaccatgcctggctaatttttttgtatttttaggagagatgaggttttaccatgttggtaaggctggtctcaaactcctgacctcaagtgatctgtctatctcggccttccaaagtgctgagattacaggtgtgagccaccacacctggccagaactgcctttcaagatgtgggtttgcttcaggtacctgcctgatagagctggtttccaatagccctgggctggaaggcacttatggtatggaattgtcaatctctgaatggcctctgccttggccctggagagcctgcagttctgactagagactagggaggcctagtccctgtgtggccttaccagtgccagccccttgtcactctcaggtgtctctcttcttgatggagtatagccgtgcttcttttgttttggacaggcacatccagttctggtctatatgggtctgctttccttgttttagagcatcactgtgtaggtggtcattaaaaaaccttttttttttcaattatcacaatgtatttggtgttgagaatgtggtgaggaggtatattagtcagttttcatgctgctgataaatacatacatgagactgggcagtttataaagaaaaagaggtttaatggactcatagttccatgtggctggggaggcctcacaaacatggtggaaggcaaaaggcacatcttacatggtggcagacaagaaagaatgagaaccaaatgaaaggggtttctccttataaaaccatcagatcagagacttattcactaccatgaaaacagtatgggggaaaccacccccatgattcatttgtctcccacggggtccctcccacaacatgggggaattatgggagctacaatttaaaaagagatttgggtggggacacagccaaaccatatcagaagggaagtctcagaatgtggtcagttcactggaaccaaggactcacataatttttggaagatttcaagataggcatcgaaataattggagaccctggaggatgtaacaaaacaagattgggaggtcatttgtgtccttagaagagtttttcaataaagtcagttgtccagccagcctcaccctcctggccctttgtgtctgacgatcttgctgcagactcacactctaactggggctgggtctcatagatgtgagagaactttcaacagaactttcagctaatgaaaatagaggtcaaaagtaattatccctgtaccgattctgtacggagtgaggctgaaaggagttcacgcattaaattacattttcagtgttctgttccaaacgtatgctcctttacaactttatttaaagaaaagcgtaatgtgaaaggcttttaactctgatggaagaaagacaggagccgtagtcagtaatggtagaatctctcatctcattgtctgctccaagaacaaagatttttcaaacctggactcaagcagttcccttggattatattaatggaacataaccttaatagcctcctccagaggatgttctaaagtatacgttggctgtctagaaacgtctttgatcttaaactttttattattttgctgtataaattttctgtgctctttttgccaccaccatgtcatcagatatctaagcagtttgtttagaaatcggaatccctttagagatgaatgttgcatgtgtatctcttttagtttatggggatgtttgagaatggatttggggtagattttacacatatttatagggcatctactatatactgttccaggcctttaggatctctcagagaacagaaaagaagatccataccttgatggggcttatattcagtgaggggaaggcaacaagcatgataaataagaaaacacaacgtttgttagaaggttataagtgatatggaaaaaaagtagagcagtaaggaggatgtggggtggtggggagaggagtgtatgagcccagaggtggcacctgtggcccggcctctgagctgtgactttctatcatgtcaaactaggatgatgagaaattacatctaaggtttgggaacaatgaggtgaccttcttttaagaaaaactgtccagtaagtttaatcaaacagttcttaggtaataagattgcctagtgtacttccttgtagggaattagcaaatctattttaaaaatctatacactgtgcaaagtttttgtgtgtgtgtgtgtgtttgtgtgtgtgtgtgtgtgtttaagatagctcatactggtgtaagaaaaaatatgtttaaaaatctgggagtatatgtgaacttggtaaggtcaccggacttctgcagacttagtttcctcatctgttagacaaggattgggtgctggaagagtagatgaggtaatggacttggaaagacagtgaaatgcgggccatcatgtcctggagggaagtgtcctgggattggcaataatttacacaagcgcctgggagagtttattaagtgtgtggagatttggtctcctcagccttctgttgttcattgttcccctgaagagtctgccatccaggtttacccttgtgcctccctgacctgtgctgagactaagagtcaggcagagagaggtggtgagttctggtagtccttggtaatgtgtaaaacactgccaggctgcatcctgagaagggggactgggtacccatgttttaatggagggatatgttaactggactggatatataatgacagggtgtacatgaatattgtttaacttttaaaagaggtagtatatatatgtcttaagcgtcaaacaggtatgaaaaggaacacagaaagctcatctctcacctcttttccctttgtccaataatcactctccatccagataggtaataattgatattagtttatccttgtggatatatgtgtatacaaagacaagctactactaatatatattcttatttcccctctttttttttaacatgtgatagcacactatacatgttgctacaagctttgctttttttccatttaagaatacattttggaagtcttccaatatcaaagcaaacacttccttggttctttttatagctgcacagtaggacattgtgtgaatggttgttataattttaaccaggtccctttgagagacttgtcttgtgctcttatccacagtgccgccatgaataccctgcacatacatcatttcacctgtgggcacttttattttaggatagattactggaagtgaaaatgtagggataaaggctgtgtgtgctggtaattttgatagatcctgctaaactgactcttagatgggttgcagcagttaatacccctaccttggaaccttacccctgaatgacaccattacctgctccttactacgtgtattctttaatacaaaacttaattagactcatattttttgtaaagtgaatactttcttcctactattcttaattgctgtccttagtcgacaaggactcactactttcattttatcgttctctgtcgtttgcttctttaccagtgtacgtaaacatctatgaattaatgctttgtgaaagggaaactgttatttaaagatatgtaagagttattttataaaaatatattataaaatgtaacttattttacttcccctagttttttacattttaggtttttaggtattagatttgttttaaaaatggagagcaaggtgcacaatgaagcaaaggcaaaattgaaataatatgagtttatttagctagtaagactgcagagaagggacagaaatctcaacttcacccacctctctcttgccaagaaaccctgagataccttgaggaacagaaggctcaggaaatggaaaaaaaaatcctgaccaatagttactagtttagagttgtgaacccaaaagtatctgagacaggtctgaatcaacatagaaaatatattttgccaaggttaaggatggacccgtgacacagcctccggaggtcctgatgacatatgcccaaggtggtcggggtacagcttgcttttacgccttttagggagacataatacatcaatcagtatctgtaaggtgtacattggttccatctggaagggcaagacaactcgaagtggtgggacaacttgaagtggtggcaggagggagcttccaggttataggtagatttaaacaatttctgattggcagtcggttgtaagagttaagttattatctaaaggcctggaatcaatagaaaggattgtctgggttataatgataaggggttgtggagaacaaagttttaccatgtagatgaagcctctaagtagcaggcgtcagagagaatagattgtaaatgtttcttttcagacttaaagtctctgttgatgttaatgctggttggcttttcctgaattccaaaagggaggagggtataatgaggtgtgtccgacccccacttcctatcatggcctgaattagtttttcaggttaactttggaatgcccttggctgagaggggagggatccatttagatggttgggggtgggaatgccttagaattttatttttggtttacagagtcaggaatgtctgtcttgtactcagagctgatggagggcagggagggttcaatctctgccttcaggcttcagtttcctcaagtgtgaactggggatactgacaagacctgccccacaggacattctagaggattaatgagatgatgctggaatgtggcgagcacattccaggcctcctaattgcccttctctatatgtgagctcatgtatttccatggttcctcacaagtagcctttaatctgtgcacatcaggtgggcttctgagctgatgagccaaggtcagaatctccaccatcaattgtttattgtgaccaataaaccagatgaccccccttcagtggctggaaagggtgactggagctaatgaatgcatccacaaatggctcttgatcactgaaactgggtcaaatttccttccttttggaaaatgcccaggtaatttgcttcctgaaaacctattttatttcttttaacctttttggaaggctgttaatgggatagtttaaatagaaataagaaaacctcttttctccaggccttctctggttgttttaattagtacatttctatgatgttactgtggctattcaccagtatggctttgagccattaaaggccacccctcctgccttaacccccggggaacatcgataatacaggaacaattgctctctcagtattcttccttagttgcggctcatcgtcctttactggatttctccatcagtatctgtctggggaggataacagtcctttctttcttcctgtggtcctcacctgaggagcatgcatttccttgcattgctcaagggatggtggctgaattaaggaattccttgtggcctgccactttcaggttgctgaatgcagggatgagatgtggacccactggtctcatttgacatcacaggggacagagtaaaatagcatattgtgcagttgtcaggttttcttctaatactaggaaaagataaatatggggattcataatgcagaacaacaggaagatggaaataaaaatgaatcaaatgagggagattatttatgttcacttagattgttgtggagaaagctaatggcattgatacctctggcctggagtccctcttgaacaccttgctgatagagcccattcagtaggaaaataccgggaggagagaggcccaggaatcagttgagtggttggtccaccactgggtcaaccctactgtagtggggatgccctgaaccttggcattttaagtggaaatatggggatgcaggtatttgctgagatatcttagttgctggaggtcaggtcttgttggcatggggccttcagagcatctcgtggtgactcataaataccagagatgcctctgacaggaacaaagctggcagattctcatattccagaagactctgactgaattaatcagtttgaagtcacacacacaaaaaagaaaagagtaagctcagaataaagagcttagaccttgaatgggatgtggccactgaccatgcctcaatatccagtatttacattttgtcagttacaagtacttccacatgccatattcttgatattttcaagacctttcttttgcttggtaaatacaaagaggagctctaaaattgacctttgcatcacaaccttcgagggagacaagcagaggccccttctccctggtccctaagggacaagatctggagccaaagggcaggacctggttagtacacagtgggctgcccctgaaggtaggttgaagaattgagtagattttatctcctgtggtcctcatcactggtgaaccagtgctttttgctgtagattgcatgaggaactgacagagaggtgtggttggtgctcctattgttttaaacagctcagttaggtgctgaagcatcctgccagggtgtggagaggatgccccagcacagtcaggaagaggcagctctgatatatccctgtcctgtgccagtgtctagaggtgacaacgccagaccaaaatgacaacactggtgttttcatgtcttatcacaccaaaatactggtagtaaggacagagtgagacgtgctcaccatggttcttcccatttggagctcaggggttgagtgcagcaagggctgagatacagcacccaggccctttgccctttggctggagtctttccagtaagcctgataggggaaaacagtcttgaataaagcacaataccccagagtaggggtcctcagatgtgacatcttccaggcgtcagtcagctgagatgtggctgtgacatcatcctgtcccctcccaggccctattgtccacactctccaagttgatgtcagctcctcaggagagtagccatgggagcctagggccttttgggttgtggagagagagaaaagttctgtccccattttatcttcattcaaatatcctaccccccagctttattaaggtataatttacaaaattgtatatatttatggtacacaatgtgatgttttgattaatctgtgtctacattatgaaatgattaaagcaaactcattaacatctccatcacctcacatacttctcatttttttgtggtgaaaacatttaagatctactgttacagcgtttttaaagcatacaatacagtattattaactatagcagctattctgtgcaatagatctccagaatgtgttcgtcgtaactgaaactttgtatcttttgactgcgtatcagtccccccattgcctattaaaattattacacacatgtgggtttggccttttgattttagaagccaagatctagcttgtctttgttctctgggtttgccatgcattgcccaggaaatgttctcttttccaagtgaacggcgatgtgagggtgggaggtggggccatgcatcctttactttttaacctgttactcagccgcagtgcttagaacaggctttcacatggaatttccaaagtcaccggctcacaaaatcaccctagtgcccctaggtgtgaaatttatttcctctggtctcagttgccggaagagaagtaaggataatgcagggaggcattcatgcctggaaacctatcccattcaagggctaagctctttattctgagcttactgttttcttttcttttcttttttttttcttgtgacttcaaatatcctttctcttatggaacgatcgtgattgtggaaggtatgcatgtgtatgtgtacatgtgtgtcctctttaatgttcttagttggttaaataaaaacccgtcagtcctgtgttggtcccccgaattaggtggtcttcactgttcttgagcggctgagccctttgagagcttgtgcgctgtgttcctatgtatcctctgacactaccctgcaattttagttgtacgtgtgtgtgtgtgtgtgtgtatggtggggagggacaaggcagaagcacagttcgagaagcctgacacccactctttgcagagggtattttacaactaaggaagcacaggctttgagagatggaatctttgtattgtgaactaccaagctttttggtatcaatcttcttgcaataatacacttcacgtttcagtgatgtttaaaagtgcgtgttttgattatctttaagtattccaggtatatgtgtgctttctataataataaacagaagccaatacttgcatactggttgaaatctggtgctttttaaagtttgcatggacaggttgttatccagttgccatccagcttgtccaccaggtgtgttagggatgggctgtgagcaccaaagtgcgaggcctatagtggaactgatagagtaatatcaacattttaaactaattagatgaggaaaaagcatttcacagaaggcgtgatggcttcttgccctccagctggaaggtggcagagcataattggagttagaaagctttttaccatcagtgatttaactgagcacacttgaaggacacccaggagtaatgcattaactgttttgtttttgtcaaaaataagcccaggtgtaagacgggactcctcagccagaacttaaaccatcctagtaaggagaaatcaggaaaccagccatctagctcttattttttagagcacctgcttgtgtgtgctttgaggatgctgtggggccaagttcagccagggccccttattttgtggaacttctgtttggtggggggagataaagaagaactaagtagaactcaaagagtaattccaggcggtgacaagtgcgtggagaaggtaaactgaggcagcgagtgctgttagatggtgtggggcggtgagaggcagcctcctgactgaggaaggcccacgggactgagagataggagcagcccaggtgaacagtgagcaaggcacagtgtgcagtgagcaagggagagggctgcagatggggcctgggagggaggaaggagtgtgtttctggtgcgatggtgaagcagccagaggcgtgttcagcagagcagtgaccttatggggacaggcatggtctctgggcccaggggggctggcttgggagcctctgccgcctcctcctccctgcagcctcagccagtggcagtgtcccttcccctgggttctgtctgagctgcctcccaccctgccctgggctagggagttgatggacaccatagtaggctggacatgaccacctggagataccaagtcctaatccctggaatttgtaaaggttatcttatttagaaaaagtgtctttggaggtgtaattaaatattgtgagatgaggagatgaccctggattattcagatgggccctaaatgctctcacaagtatccttttaaaagagaggcaaagggagatgcagacacacagagacgaaagggatgtgaagacagaggcagagatcagagcgaagtgactccagctgaggaacagcaaggaatgccagcagccaccagaagctggaaggggtgaggaatggatgctgctttggagggagcctttggaaggaacatggccctgctgacatgttaatctaagatgcatggccctcagaactgggagagaataagtttctgttgttttatgtcaacagtttgtggtagtttgttacagcagccccaggaaattaatataggcctgagagacagagagagacagagagagagagagacaggtgttagggagagaggtgtgttagagagaaagagatgtgttagagaggtagagagagaggtgtgttgaggggggtgttttagagagagagaggcgtgttaaagaggtgttagaggtgtattcgggagagagagagaggtgtgttagagaaaggtgtgttagagagagaggtgcattagagagaggtgcgttagagagagaggtttgactccccaaactcctggaaagcccaagggtgatggagaccacgctcccactttgtgggactatccccttcacatctcttctctttgtgcttcaaccaggcctggcttaacagtgggcgtctcccactgtcacaccccaggggctggactggccacctcttgtggataagggtggcgtgcaggtggactgtgaccacctagactggcacatgcatggggcagctgcatccgtctcagctgatgctgccctgtgggatgtgggaccagtggggtcagatgtctagttttctcagacaagcctgaaaaaaatatgatttgttttaaaacatgacctgtcttggtattgaaagctggcttaagtttttaaatctgcaggtccaatttgaccctagggtgaggtgaagggttctgttttgtaacttctgtcttacagtttttatttctcctagatgttagcatattaaccccccaacacatttgtatgacttgggacaggattttagtcagtgtgttagtttctttttgctgctgtaacaaatatcacaaacctagtggcttaaagcaacatgaatttattatttagtagttctaaaggtgagaagtccaaaattgattttatacaaggactaaaatcaaaatgtcagcagatctctgttccttctggaggctctagggaaaaagatattccttgctttttccagcttctagaggctgtccttggcttgtggtctcttccagcggtggcattacaccagcccctgcttctctctccttcactgtcatctccctctctcttataaggaccttgtgactacactgagtccacccagataatccaggataatctccctatctcaagatccttaatcccatttgcaaagtctcttttttcatgtaatattacttacatattcaccagttctggggattaggacatggacatctttgggggtatatggtgccctccacagttagtgacccatattttcctgtagatctcatgccctgcatatgaaaacctcttatggcagccctgtctctctcttacccacttcaatgcatgctggagctgcctcgtaccagctctcaagagctgattgtgcttatcttttcccaattttgtgttcagtgaagtgacttcatgttggtagcttgaaggtggccagagtgaaactatttacaccttggaagtcagcaaatgctatggctcagggcttcctacctctccccctactctttaacctggagagctggacaccattgacttgcacctattcatttgggctgggattcctgccttttgggatatccgctctgtttttctagggactgccatctcatgtttggggagatgaatgtggatgtttagaagcattatggatacctccttatggagacctttattgacatctgcctgaactctgtaggtttggatagtgaaccatgtaccccttgggtttctcttccttcggggggatttttgctcatttctacttggcattacaatcttttttttcttctcatacaagggacgcgttacttatgtactggctttcagcaggtgacctccctgcataagcattttgggcttatttcctgtgtgtttcagtgttagaggaccttccggatccctctctgtgttttgacatggatagatggtgtgttggtgcatttgtgtggtggatttagtcctgttgaaagcttggtggttgtgctcactcataatctgcagagcctggttgaatagggcatatctggaaacatgctaacaaggtggtggcaattaattaagaattcttcttaattaaaaaaaaactactatctttccttactaaccgagagatacttgtagaataaatattcaatgaaaacctcaagcctgtttttgcacttggcattttattgtgctaactgtgccttttgaatctctaaaattgtgtttgctcttctgtttcttaatggaatttcaagcaacgttttgattgagaacttccatacaaaggactgcttaaaatatgaaaaaaattgtagttttttccttttatgtcaataattggttaattgtttcttggtgggtcctaagaatgtgtcttccaacttcatttcagtcggtctgctctgatagcaccagtatttttctcgcatggattgcaagcgcatttgagacataattgctcttatcagttaggttttcagtaaagtctcattaattaagcgtgtgattattatctaacattccctgtatatagaaagtttgttaaaataagttttcaaaaaatgaaaactgaccaacatacaggtgaatttacaaaagctgagatgctaatgtagcactaaaagaatgacagatgatcagcttagaaaacgaagccacactcgaatgggacaactgggtccaaaagggctctctagctggaggactagcagggctcaggcatgtgaacttctgccttagtgctcttcccaccatcccagcagcctcttccaggctgggcagcctggagcctcagcacccccacacctgctgcttcctctgcatgaggcccttcctctagcttcaggtcttagcccccatcgtccctgtcccaggaaaccctccctggctactgaaccacttgtctcctcctgtagctctggttacaaccgtgacacgtttgggctgtcacctcttcttccctgtcttctctccagagccagggctgagggtgtcctgctcagctatgctgctgagtccagcacagtgcttggcccagagtaggttcttagggatcatttatagagtgcgtgactgagtggcttcctgcctttcctgctgctgaccctaggctcatctaagatgctgagatattatgctgaatttgcctacgaggccttgggtgggaatggagggggtgagaaagtaggtggctggctggaggtgaggaagaatttgctattcaaccagcagacatttatcctgtctcctccatgccaggcacaggcaaagcgctttgagtgcatttccgcatttcattttcacaaccaccccaagaggtaacctttaatttatgctgtagatattagcacccacctgtggcaggcattttgttgagtgctgaagatacagtaattaaaatccatgagtctttgacttcacgcagcacatactctaaaacgttcaaatgttagtggtgagagggtgggatcgtgggaatggtaccgtcatgactaaaaattccaattatttagtttccatttgagattaccagcatattttatgattatagtttattctactttggatatttaaagttgattaactcagcctctttcacaattattttcactaggtactgtcataattttgaatgtctaactggtagcttgcctttaacaagaaccatttgcggttgttccaaatgtgaacattacatctctaagagagttaatccaaattgaaacctgctgaaatacatgaattattaaattaacatattatagattaggtcattgttttggggaagttttactagagagatttttgtaatttttaaattcccatgccagtacccaaattcacagatgctaaagtctttcatacaaattggtgttgtgtttgtatataacgtatgtaccttgtcccatatacttttaagtcatttctagattacttataataactaatggagtgtaaatgctatgcaaatagttgatacattatatttttagcttgtttttaaaattattgtacagttactttttatttttttttctgaaaaaaaatatttttttgagatgaggcattcttctgtcatccaggctggagtgcagtggtgcaatcatagttcactgcagccttgaactcctaggctcaagtgatcctcctgcctcagcctcccaaagtgttgggataacaggtgtgaaccactgcacctggccctcaatatttttgatcagtagttggttgaacccacggatgcagaacttgcagatacagagggctgattgtattatgcttacttattattttagttaaaaatttgtatttgtgagagtttttcagagaagcagaatcaatataaggaatgggcttatgcaattacggaggctgacaagtttcaagatctgcagtaagcaagctggggatccaggatagctgatggtgtagttccagtctgagtctgaagcccccagaaccaggagagctggtgatctatttctttctgaatgctagtaggcttgagacccaggaagagttgatgtttcagttcaagtgtgaaggcaggaataagccaatgtcctgaaggcaggaataaaccaatgtcccagctcaaggcagtgaggcagaaggagttttctcttattcagcctttttgttctattgaggccttcaactgattggatgaggcctatgtacattagggagggcaatcttctttactgagtctgctgagtcaatgttgacaaataaaactaaacacactaaccctgtgccccagtcaagttgacaaataaaactaaacatcacaaaattgtttctaatcccactacaatgtctttattgaccttagggtcatttataacactcagtttctaaacatttgtggaattttctatttcataagttattgattgctaccttaatatcactctgatcaaaatttattctgatttcaatcctttgaactttgtgaaattatgatataaatcaatagtgacaacttttctgagtctctgtttgtgttttttattttaaggaatacgtagttaagttttgatttttaagaaatctgtaatatttttaacttttagagaatttaatgtacttataattaatggaattactgatatgtttgagtttaaatgtcatattattgtttttcatttgtcccatatgttctgtgttactttttcctctccattcttgctttgttttggattaatcaagcatgactttattcagatttgtttacctttaccaccttgttaattaaatcttcttattttattcttttgatgcttaccctagatattacaaagtgcatatttaactagtttaaggtactttactgtattcataggttgttcaacaatgggcatatgttctgagaattgtgtcgttaggtgattttgtcattgtgcaaacattgtaaagtgtactaaacctagacagtatagcctgctgcacaataggctgtagtctattgctcctaggtgacaaacctgtatagcacgttactgtattgaatattgtaggcagttgtaacacgatgataagtatttgaatatctaaacatatgtaaatgtaggaaaggtactataaaatatggcataaaggacaaaagatggtacacctgtataggaaaatgataaatggagcttgcaggagtggaatgaggcagtggggtgaggagtgagtgaatgtgaatgcctaggacattactgcatactactgtagactttataaatactgtacactttatacaaaattattttttggccgggtgcggtaatcctagcactgtaatcccatcactttgggaggccaaggtgggcagatcatgaggtcaggagttcgagaccagcctgaccaacatggtgaaaccccgtctctactaaaaatacaaaaatttgtggggcgtagtggcacgtgctgaatcccgtctactcaggaggctgaggcaggagaactgcttgaacccgggaggtggaggttgcagtgagccgagatcgcaccattgcactccagcctgggtgacagagcgagactctgtctcaaaaaaaaaaaaaaaaaattatttttctgactctaataataaattaaccttagcttactgtaactttcttcttaaaagcttaaatatttgaagctttttgactctaataacagcttaaaacacaaacctattgtacagctgtaaaaaatattttcctttttatatacttactgtatatgctttttctattaaattttttttttacttaaaacattttttggttaaaaactaagacacaagcacacacattagcctaagccaacatggggtcaggatcatcaggatcactgtctttcacctccacaccttgtcccactggaaggccttcatgggcagtaacacctagagagctgtcatctcctgcgatgatagtgccttcttctggatacctcctgaaggacgtgcctgaagatgttttccatttaacttttttttttaatgaagtagaaggagtacactctaaaataacattaaaattacagtatagtaaatacgtaaaccactaacatcattgtttattaccattatcaagtattatgtactgtacgtaactatatgtgctatacttctgtgtgattggcattgtaataggtttgtttacaccagcttgaccacagacgggtgagtaacgcatcgcactacaatgttacaacacctgggacatcactaagtgataggaatattccagctccattataatcttatgagaccaccgtcgtatatgccatttgttgttgactaaaatgttgctatgcagggcatgactgtatatgaatatttcaagaaccttggaacactttcacttcttttgcctctctcttgtctttcgtgttgtcatgtatgtcaggtctctcttgttttaaattcctattagatattaaactttaagatattattcttatttcatacaaagtgtgtttagattcacatacacatttacctttttggttgctctttattctttctcatgtttcagattttcataagggataattttctgcaaatttctatggtggtactaatgtcagttaaaaaaaaaatctaccctgcttagattcccgaagcttcctgaatttgtgactgaatatcttttttttttttttttttactttatatatatactttaagttctagggtacatgcgcataacgtgcaggtttgttacatatgtatacatgtgccatgttggtgtgctgcacccattaactcatcatttacattaggtatatctcctaatgctatccctccccactccacccaccccacaacaggccccagtgtgtgatgttccccttcctgtgtccaggtgttttcattgttcaattcccacctaagagtgagaagatgcggtgtttggttttttgtccttgtgatagtttgctgagaatgatggtttccagcttcatccatgtccctacaaaggacatgaactcatcattttttatggctgcatagtattccatggtgtatatgtgcatgactgaatatcttttatcaccttctgaaatttcttaaccactgtgtttttaaaaagtgcttcctaccggttctctttctcatttccccttgtgggactccatgaggttagaccttttcacaatatcctctgtatctgttttgcagtttcctatatgtttcccatatgttatttttattgtgtgttaatctgaatattttctgttgacttatcttttaatgcactgacattctttaacattgtatctgatttactgttaaacacatcttttgtgtttgaaacctcttaatttctcagttcaagaatattcacttggtttttcttacagacaacaattatttggtgaaatttacaatcctatttttttgaacctattaattatagttattttaaagcctgtgtctgatgacctcaaacctgtatcactggggttctgtttctattacgctttttttttttctcttggccctgtgtattgatatgctcagcaacttcagactgagtggtggacattgtacttggaaacttgtagaggccagggtctctgcattgatatttctccagagagaattttctttaatttccggaaagcactgagactaggagcagtgagttcaccttcaccggattggggactgaactgacaggagcctgggtgtcagtctttgtatgactggtctatttctgactggcccttaccagcagggtgtaattcttcagtagtccagactgaaagcctggagcgtttaccagcgtttctcaatgtcattggcactgaactccagtgtttttctccccagcatcgtgagactgatgataggtctgtttcggttttctgccttttgatagctactctcagttaagctgtgctgcctctctaaccatgatacttgtcccaggtaaatatcaaaccccaggaagagggaaatggctcagactgtaaggttatcctctctgcaattccccgcctcctgcccctgatgctttttttttttttttttttggagacagttgctctgtcacccaggctggaatgcagtggcattatcacagctctgcaacctcctgggctcaagcaattctcccaccacagcctctggagtagctgggaccacaggcatgtgccaccacgtccagctaattttttattttttgttgagacaagggtcttgatatgttgcccaggctggtctcaaactcctggcctcaaacaatcctcccacttttgcctcccaaagtgttgggattacaggcatgagccaccatgcctggcctgcaattcccttctttataggatatttgccccttgattcctggctgccttggtagctctgaactccaattcctgtcttccaaccctgctagtcctataacactgccgaaagctctgttcagcttctcagccttcagccacgtggcttttgatttatccagtgcctcaaagaggagagcaatgtagaatgttgagttcacctcaggaagtttctattttttttccagaaatttggcctctcaacttctggctgccttgataggtctacagttcctccaaatacatattatctgtacttgatctagcttttctaattgttctcagtaggagtgtttgtctcctatagtctagtccatcattgcagtaagcaaaattcagggatagcttttacttttagtaggaagcagctatgtttggtagagagagctctgaactcaagttaaacacagaatgaatctcctttgtcctggcagaccggcagggtcattgtgaagatggcagaacatgttgatacgtaaaatctgctaacaacatgaatagaacagtacaaatgttatggaagtcacagttgaaaatgaaccaaggtcttggggttaacaatatgttactgtgtaggggctatgttttcacgttcaggatctgggtgtttggcaccgggagaaatgtccagcaccgggattttgctatgtgctaggcccctttttgtgcgcttcctggggataagctattaggccacatttagtagcctcctaaagttcactagtttacccagcttgcagtgtttcatttgcccatgaagttgtttacttagggacagaaaaaaaaataacaaatttttagtcttttagaagagtaaaatttggttttttggtattcctcgggagagtgaagagtggagaaattttgcaaggggacaagacagagccaaacatttcagctattgtccatggcttttttggggagggggcgggggggcagagtctcgctctgtcgcctaggctggagtgcagtggtatgatcttggctcactgcaacctccgcctctcaggttcaagcatttcttatgcctcagcctcccgagtagctgggattacaggcgtgcaccactacacctggctaatttttgtattttagtagagacggggtttcacctcggccaggatgatcttgatttcctgacctcgtgatccaccctcctcggcctcccaaagtgctgggattacaggtgtgagccactgcacccggcctgtccacgtctcttttggtcacctccctgctccctttcatgaagcttgacagaagctgttcttctgagccacccatgctcatctgaagcagaactgacttgcattggaaagcaaatggagctcctttcttggttgagtactttgttctttgttctaccatgttctttgcatggtctcggtccagcagagctctgtggatcctcttctatttcaatttaaagtttatgtgtttaagggattttgtgtgaccctttccaagaccaaatttctgccttgtagcttagacactagggacagtagaatagtggactttcagagcttccagagacttggtctattctcctgattttatagatgagaaaactgagggctgttcaaaggttcagtttggcttccttcacaggatggtatagcagaaaccgggaatcagatcctgactgtgccacttaactggttgcaatcttagagagacatctaacctccgagtgagttttgattgtatggcctgtacaagaataatgagaaggatgagaatgatacctgcctgtcactgagaattacacagaatgcatatgaatcacctaggctggtcaccactaactggtgctaaaaagattaaacaagtatttattgacttgccagactgtggtgggaacatgggccctgtctttgaggaggtggccatggtctagcagtcatctctttagcaacttcatggggattctagtcttttatttcacacatgaaattcagaccttgaagtcagaaccctgagaacaaggacttgtgacccattttatctgcaactttattctttctcccattattgctctcagcaggcctctcctgatctccaccaaggtgtacactgtggaaactggataatagcctcagtctgaattgggagatgacagaatcactgtttcacagaggaatattactgcctatattgtcaagcatggagtctgggttttcaatttgggcttcagacatgccagagcgacacagtgccctgccgctcttctctgcatgagcagctcacatttgttttcatggaagaccctgagatctttccagaggccagttgcatcagcacatttgtgtgtctcagatacctccagggcgctgggtatctcccgtggagtcagagcttcctttgtgctgtatggaagattcaggaatgaatgcatacgtttcctaaaccaacaacactgctggaaggcttgatttcctttctttcttgtttgggtgctttgttctacaatggtgattctattttccttgatctttgtaaggcctcaagggctcctggtttctatgaatttgaaagtatttcagctaattaatttttttttttttttgagacggagtctcgctctgtcgcccaggctggaatgcagtggcgctatcttggctcactgcaagctctgccgcccggattcatgccattctcctgcctcagcctcccgagtagctgggactacaggtgcctgccaccatgcccggctgatttttgtattttgtttagtagagacggggtttcaccatgttagccaggatggtctcaatctcctgacctcgtgatctgcctgccttggcctcccaaagtgctgggattacaggcgtgagccaccgtgcccggccaaattttttattttttatttttagtagagacagggtcttgccatgttgcctaggctggcctcaaactcctggcctcaggtgatcctctcacctcggcctccgaaagcgctgggattataggcatgaatcaccatgcccggcctaaagtttctgataagttaagaaaccttcatggaatttgctattcggtccccctttttttcttctcttactctgttttgcttgcgtgacaattccccagttataaaaatgccagtttcccgctagagtatctgtcgtcttggcaggctttttatgtcatgcaccaaatttactgttctgggacccattttgttatatcttgttcagaccactcatttcagtagaaagggaaattgtaatatttggacacctgcaggttacagagggcttccttcccttctcatcttgttgtaacttcttgtcatctgtgttttttgccactgcaacatacgatgcttctgaataacacagggcaggagaaggatcagccatggaaaaatgttatgcaagtaggaagcgttgccaaaggtaattttaagtttaagcaaaaaaggaaaaaagtaaaacaaaaagaaaaaaataggcttacacacagtgctattaagtcatttaattgtttttttttttttccattctgtgttttaagtattttaaagtcattagtgttcctagtttctggttctaaaagcagacatgaatttaaaaggcagcatagttttattacagggaaattatgccagatttcatttttttctttgtcttgccagcagagtatttcctagcttcttatttaagcttcctaaagatgaagatttgaagtttgtgtaattctccttcccaacttaccttacccatatccaagaagatgttttgcaacctcataagaattatgtaaggtaatacatgtttgaattggtaaattgtgagggtcattaatttctgaaaaggcataataatttctgtagataatttcgaagagaataactgtgatctatgaataaaaggctcatctcagcatgtaaatagtttctgagccagagttagacacaggggattctaaaggcaaactctgttggactctgtgggagacaggttgcaaatgttgagcttcattaagcatgttatacttacagctcaagaaatgcaataatttgtgtgagagattattcaggccacatgttacctccacagtcttataaaattccttctattttgccaaggaatctagatatgacgtttttatttcaacaatattttatataggtagatgtagataaatctctttacaaatggaggaattacaaatgctaatttgttaaattgagctgtaaacattttctttgctgcttaataggacaaaatacataaagattaattaaatgatcaaaaatttccaagcttctttttaatcgtgtaaatggggtctatcgccaaaagatatccagccctggtaaacatgatagatgatgatggggacacatggtgacttggatggactccatttctgggttctgcctgagtgtgttggccacaggctgtggtttacaaaaaatatcccctctgctaacatgtgagccggggtgtggtggtcagcagtttgctgtgatgtctttagggtgcctccccagggagaggatgaggggagtgctttgtggctggggatagggtctctaggaagtgggtggctcaaatgttattactgccgcatgtctgagtgtttctgtttggtgaaatccaggggagcaccttggctgggtagaagttcttaagcaggagttacaaagcctgccttctggtcctcactctgccagctaatttcatggaagcacagatccaccatacctgcaagatggggcagtgttacttatttctccctttcagggtaagtgtgaggcgctctttgaagtgatgattgtcagagttccttgaaaaacctaaagcaatgtgttagttaatatgtcagtaaattcatcaggtactctctgagcatctgccaaagaaacaggccctgtcctgggccagcctcatgagcattaggctcacacacgtacataactgtgtttaatcatgttgtaaggatgctttgaggtgctgctagaatgccaccttgcatctgaaagggatttttgtccagtttgttcacccatatatttctagtgtgtaataaactactattaggtaattttataaaaatttgttgaatgaatgaatgtttttcacaagtattataataaataatacatggtcttgtcaaggccaaggttattggtttcatgttcgtcatattccattccgtagaggcagacagctgctcactgtccagcaggtgcatggtgaatggaaggggggtggtcctggggcagggtgggaggggagttcacaagaacccaggcagcagggccaaggctattgcactggcccttggcgcagctgccgttgcttgttcccacatggtatggcttggctcagcccccgactctggagtccattgtctcgttatttaagcataggcatgtttcacaggaatgacctcctctgtggccttgggggcggccccagctgtgtaaacacatgtgtatatgtgcatatactttatatatatgatacacaggtgtgctgtgtgtgtgtctgtctaacatgaggagttcagctgcagagtcaaacagatcgagcattccaatcctggatcagtcactgttgctggctttatgctctcagaatggttactgaatcctttgaagcttgggggttttcagctacagggaggtgatgacagtacctagtttatagggttattgtgagcattaaatgggttgtgctcacaagggttcagagtgggttgggtggtagtatttgtaagagtgtgagtgtcagttgtcactgctctcatgtcaataccacttattgtaggattactatactgggccctgggctaagaacctcatgtgcataatattaattttaataacacaactatgaactgagtttttaaactcaaaaggaaacgttacaagcggtgacttgcatgagggtttttgtttccttgttttggttgaaagagcgtcctgagccccacccctgctttgaacacattccccaactccaccatgcttccagggtctgctcctttcttaccagtttaggtttttccctgtgtggctctttgtaagtctttccctaatattggatagcccatttcttgaactgcagctgtagatcacatgaacattttgatttatggtggcacaggaggctataacaaagttacagactttaaattatgcgattagagtagaaagccatattgtaaactgtgcccttattgtttgcaaagtgtcacgcccatcaattgccttggagtttgattgatctccactgggtgctggctgtctgcaaaatgctgtactgtcatgattagtttaacccatctctactcccaaggagttgtcagtctactgcggagacaccagccagacaaatagttatacgcaataaggtgaatgctctgacagtaccagaaagacaaatatggcgggctaaggagaggaagagtggttgggtgtgttcaggaaggcccctctgagagggaggcatttgagtagagactgggtgtccttttttcattcactccacttttcttcttagcacttaataccatctgatgcttttatgttccactccctcccatccccagaatatcaattctgtgctaacaggggcttagtctgttagcatttactctcgtatcaccagggcctgggtcaggctggcatgatgtggaatgaatgaatgatagacagatccattaactgggagccacagaacaatcacccacagactgtgggctgcatagaaagggttaccagttaggcaagggtgagcaccacacagagggcacagagcaccaatgaatgccacagggacaattcatccgaaggcatagagcctccaggcaccataagtggatgcgtccgagcatatatttttaaaggctgccctacctttttggcttctgtggccttccacaccattggaaacacatccaatgacatagcactggtgaagtggcacagtgactctttgtgcttcactttctgaaggagtataggaacattcattctttgggacagaattcttgtagcattagggaaatgagcaatctgaacttcttggcattctaatccaaggaggagttgcttgcaagcaagaaatctgaatcccttcacaggtcgaagagaagttggggatccttaagcgtggagggtttgaaactatttggtcatcatacagtttattttcaattgtcttgtagggctgcattaggaattgattttatctagaagacagaggatactgactattggtcaacaataacaccaaataagttttcatgaacattaaaaaaatatatcctggaagacaacctgggcattcatcctggacataggaacgggcaaagatttcatgacaaagacagcaaaagcaaaaattgagaagtaggatctaattaaacttaagaatgtctgcacagcaaaataaactatcaaaagagaaaacagacaacctgcagaataggagaaaatatttacaagctttgcatctgacaaaagtctaatatccagcatctataaggatcttaaatttacaataaaaaaaactccattaaaaagtggcgtgaacagacacttctcaaaagaagacatacatgcagccaacaaacatgaaaaatagctcagatcattagagaaatgcaaatcaaaactacattgagataccatcttacaccagtcagaatagctattattaaaaaagccaaaaaccaaaaaacaaacaaaaccaaaaagcagatgctggtgaggttttggagaaaaggaagcacttatacactgtcgatgggagtgtaaattagttcaactattgtggaaagcagtatggcaattcctcaaagagctaaaaacagaactgccatttgacccagcaatcccatttactgagtatatatccagaggaatataaattattctaccataaaggcacatgcatgcaaatgttcattacagcactattcacagtagcaaagacatggaattaacctacatgcccatcaatgatagattggataaagaaaatgtggtgtatatacaccatggaatactatgcagccatataaaagaatgagatcatgtcctttgcaggaacatgagtggagcaggaggttattagtcttagcaaactaacacaggaacagaaaaccagataccacatgttctcacttataagtgggagctaaatgatgagaacttaataacacaaagaagggaacaacagacactggaacctacttgagtggggagggtgagaggaggaagaggagcagcaaagataactattgggtactgggcttcatacctgggtgatgaaataatatgtacaacaaacccccaagacacatgtttacctgtgtaacaaaccttcacatgtacccctaaacctaaaataaaagttaaaaaaaattcccgtcttccagatcttggtttctaataccatttccctataaaaggaaccaagactacttggagaaatggctgattctaggatgagggcagggaatttatgagtctggggcattcatagtgtcctaaagtaaagatgtgctcagcaaaccaagcaaacacaatgattagtgtgtgctagagggacagaggggtcaactgagaaggatcctgtattagtccattctcacattgctataaaaagatacctgacactggataatttataaagaaaagaggttttattggctcacggttccacaggctgtgcaggaagcatgaagctgcatctgctcggcttctggggaggcctcgggaaacttacaatcacagcagaaggcaaagggggagccagcacttcacgtggtgagagtaggagcaaaagagagagatgggggaggtgccacgcacttttaaacaaccagacctcgtgagcactcactcattgtcacaagaacagcaccaaggggatggtactaaaccattcatgagaaatccacccccgtgatccagtcccctcccctcaggccctgcctccaacactgggggttataattcgacatgagatttggtggggacacagctacaaaccatatcagctcccagtggccaaagctggaacaattcaagcaacaaaataaagtggtattagattgtaacccaaattataaaataaatactcacaatatgtataaataggggggcagcagacaaggaattgcaaataatttaagtagctgctccggcttccgggaggtgtgtaactcccacttctcaagtgttggctgtgcatagtgactttctttcaaagagtacagcatggaaaggaagggggaaaagagtgacttgacagtggagaaacgtgacagccaccacctcagccaggtgatcagagttaacatttatagtgagaagtcacattaatagcatgtacccttgataagatgtgatgagagtgacactttacctctgtggtcttcctccccaaaacctgtaacctcagtctcctcatgagaaaaccatcagacgattcccatttgaggaatactctacaaaatacctgaccagtacttctcaacacagtactgctcaaaacaagcaagtctcgtagaaactgtcacggacaacaggaggctaagcaaacatgacaattaagtgtaatgtgatatcctagatgtgatcctggagcagaaaaatgacattaggtaaaaatgaaggctatctgaataaagcatgaacttcaattaatagtaatgtattaatattgattcattggttgtgacaaatacaccaataaatgtaagtggataaccacagaggaaactgggcgtgcgacatatggaaactccctgtatggccttagcaattattctgtaaatctaaaactattctgagataaagaagtttattgaaaaatacatactgaagtaaactctggaattattgtcacttttgactgaacagcaggatgtcaagtcaacatgccaatatgtgttctgtggatgaagattgaggggtgggttagaaaatcttagctcaacatataaaaactctgtgcatagaagttgtcaaagatgtagaaaattcttgccggggtcatcgggtgactctccaaataatgcaaagctcgtttgaaataccattgttccaagggggccaaactaaacaggccacatgacatagtggtcaagccatgctgccctgggttcattccagccctgcgccataactgccaagagattcttgtacaagtagtttacacttgtacaagtgtaaactgaacttcagtttcctcattgataacatgaatatcgtagtatatcatgccattggcagtttcaaggttaaaatgagggtgataatatctgtagcgcactcagcacagtagttggtactcattagctgttccctaaagggcagctgttgttgttgcctgaaacttctttttttttttttttaacatgcaaaacacattccattaagggaagtctaatgactctgcttaatggcagtagatgatgccagtggctaccttggtttgatttcaagggtaggaggacattcttcccctacaaagtgtctgttattaacacctcttccagtaccccctcgaagaattaattgtgctaaataatttgtgttaaatatgaccatgtctctttcaagctgctcatgtccctagaaggaataggacatccagtgtgaaggggcttataaagtttgccgtgcaggggagccttgaaacaggtagagcagaggcttggagagggagaaagcagttcagaggagagggtaaaacttgtttacttcccagacccacctagatctacctagggatggccccgttgctctttatctaagaaaaattagtattgtgtatttcctgctaagctaagtatccatgaagtttggatttatctgacttgtacaaatgaaatacaggtccaaagcatttttatagatttacacggtaaagattaatcttcacccaagcaactggatccctggagcttggcttttatgaagaggaatgttagctcacccaccaagacttcatttaatgtgctcaagtttttaattgccttttttctgcctctcaggaattattacatcaatttcatttacccagattgaaaatccaagtgcttctgttgtcagcatgggctgcacctaagcatgctgactctggctcagtttccccttggctgcatttttcatcttttctcttttctgttgcaggatttcttcaaagttatgtgagttccacaagttccatgggtagagaagtttaggggaaaaaatggttccatgggtgaataagtttaggaaatgcgaaaccaagttaagcaggtttctttactgcaggacttttcagagacttggttgtgctgacgtgctttgagtccctgggagtggtgtggtgtggctcatctcccagtcacatgaaacctgtcttcttgcagcagcccttgatgcagagggattagtgttctgaggtgcctacttgaaaaacactgctgcatacttttttccaatttctttgcattcatcagacttgcctttctatgtccccacattgtctgtagcataatttacatgttattaaattttttctccatatcattcttcctcactgcctcaatgtatgtttgtaacttttttaatagcgtggctgagcctctgtggaaccttgggttttattttagtcacgtaatcttttatgttggcattgagttattagtgagttgtcaatcacctgtgcatattaaggaggcagaagcaaattgtggctgaacccagaggtagagcaaatcacctcagtgattgtgcaaaaaaacatccaatttggctcctataattgctttttatggcagtcccactatgtgggcttattttaatagaaaaacttgagagattaatgcacttgctaaggtattttccttctgtcatcacagagcttcttatgattggggagaaagcagtaaatctcaagttatctagtttttaggttgtcagtttttatacatgacagtacctggcagagaagtggatacaattaagaaaatataccctgtttttcctgagaaaaggaaaaatgacacaaaaggtcatttccaatttaagtctaaataatgtaaaaaagaggctttgcaagagctgctatgaagacccctaaacagaaggcagttatctctctaatgcagtttaatctgcccatgatggggccaactgagacatggtacagtgattcacatcaactctctttcctcctgtgggtcaaggaaattaatttgctcctgcctccaaactgcttttgaccaaaaccataaaccatagcactaataaactcgtttgaggtcttcagatcattttgaatattttattagcaacatatacaccaacagatgtgtttattgttgtaaaatgtaaccatactgtggaagcgatgtccataaatgtatcagtcattcttcctaatgattgtcaaaatattattatttcatatgtaaaaataagtgggtgtctgaccctgtggctagaatataggacaaaaggcagtattgtacagtaattattgagtcaactaagtcccagctctggggtaggacttggcttgaagtattgccaaggcctttcaaaggctcttgaagaacaggaaaaattaggcattgaatttttgagttgctttgctttcaactctgtaagcaagaatgcagttattgtactggttaaatgtggaaataaatcagtaaatattcataaggttaaccactatcccaaaggaaggggtgtagagcaatgagcctaacctttttagcctttagagattttataattcagatggagagacaagatatatattcatggacaaagtttaatgtcagttctagaatcaaggaacactgacgcagctcaagattttcagtagctgcatttgaaaagctctgttaatatctgttgtgacccctgttgccacatgaggtgtccaagccaaaagtgttggatcagaagaagggagatcattgtgtgctaagggggttcaggaagaacaaatgtagttctactgggtgccatggttcagaatcatcacttcacttcctaaaaagcagacaatctgagtttggctcaaaaatattatactagcataggagataataacagtgtagtgggtaaatatcatggcttcacacaagtcaatcttatgtggaattttgggcaagttatttttcttagtttctaatcctctctttactcatcattaaaatagttatagttaaaatatgactacaataactatcaacctagtttctatgagaataaaatcagatagtacttttaaaataaaatcactttacactaggctagacacttggtaaagtcttgctaagtatcagctgctgtaataatcactgcaaacgacacctgtggaatcttatttcaggccaggaataaagtttgcatagggaacagaagaatacagttaaataacttaatttctaatgtggaatattattttggcatttatgacaacagcgtctggggtggtccaaagtattaaaggggctctctacgtaagagggagtttggaatagtcaacccatcaagacaggagaaaagaattcattggtgatggtcatattaggtgtatttttgttgttgttgttgttgttgaagtgaaaacatcccagataggagccaccaaaggggctggcagatcccattcgttggtttttggaggtcaaaatcccagcatttgggttgaaagatcagggatgataagcaagtctgtttccttccaaccttcccaagagaacagtaattactagatataataatgcttctcaaaggcggttactgaaaaccctctgctgcttcagcataatcagaaagacagaagttgcaggatgattttctttgtgagaggcacctactcggaatgctaattaggcgaagtaaaagggatgtggatcagcatccaacagcgcatgcattttctcctagtaagtgaggatgagaggaaggaggaggaggaagaatttgacttatctgttttatggttcatgatgtgattccccaaattgatttcaggctcttaattcttctcatctgctggttttgtaaggagatgtaaaaaactatctaaaaataaagtttggagttttgttttgttttgttttgttgttttgagacagggtcccactctgtctcccagtctggagtgcaatggtgcaatggtgcgatctcggctcactgcgtcttctgcctcccaggttcaagtgattctcctgtctcagccttccgagtagctgggattacaggcacctgctgctatgcctggctaatttttgtattttgagtagagacgggtttcaccatgttggccaggctggtcttgaactcctgacctcaagtgatccactcacctcagcctctcaaaatgctgggattacaggcatgagccactgcacctggctagagtctttatacttttgtctacttttgctttcttttgggtgccctcaaaatagaacttgaatccagtggcaaattggcccaatagccaagagccggccctcttggggtcagtctatatctttgcttttatttgctgccaaacattcagtttctaagagaaatatgaacacttatctagaaaaatctcagtgctggcctgcacagggctgttgtttaatgatcatgactgggggctccctgcgtgttgggcactgttgtaagcacttcctgagcagagctgtatataatccttatagcctacagagcagtaggttctattagtatcacgagtacctctattatagaagagaaaagccagcacagtgagctaggtggagctgggattcaaacccaggccatctggctccagagtccacagtctaagaaagcctattaatcagcaaagggactgtctggtaactttgagatgaagacacagcctcggagcagaatcggtgcaaactgggttttctggagaccaatttgggtatgcccaattcaaattgcacgcaagagacttggctggtatatggcctgcatgctggctcacgtggctgtggtcacatggatgtgggaagtgtagggatggatgccagactggcaatatcagggaagctcctgtggcataggttgccagtgtaggatagggattaagagcttggcctctagggccacagtcagcagtcacccagcttccagtgctgagtgtgttggtggtggtaactggtacatagttccaacacagttgcttttatgtaaccttgggtaagttacttgaacttcctaagcctcagtttttccatctaaaatatgatgatgataagaatacctgtgacttagggctgccatgaggattcagtgagagtttgtatagtagttcctctttatccaaagggaatacattccagggcccccagtggattcctgaaaactggatagtaccaaaacctgtatacacttatgtgttttcctatacatacatacatactcatgataaagttgaatttataaattaggcacaataaaagattaaaaataactaataataaaatagaacatgctgggcacagtggctcacacgtgtaatcctagcactttgggaggctgagacgggtagatcaactgaggtcaggagttccagaccagcctggccaacatggtgaaatcccagctctactaaaaatacaaaaaacaaaaacaaacaaacaaacaaaaagccaggcatggtggtggacgtctgtaatcccagctactcgggaggctgaggcaggataatcacttgaatctgggaggcagaggttgcggcgagctgagatcgtgccactgcactccagcctgggggacagagtgagactcagtctcaaataaaaatgaaatgaaatgaaataaaataaatagaataaaatagaacaattataacaatatgtcagcaccaccactcttgtactttggggtcattatgaaataaaataagggttacttgaacacaagccctgcgacgcctcaacagtcaatctgctcgcccaggcagctactgagtgacaaatgggtgggtagcatatatggtgtgactacgcccgacaaagagacgattcaggtcctgggtggtatttcctcatgcagctcagaatagcgcacaatttaaaatgtatgaattgtttatttttggaatttcccgtgtaatatttttggattgaggttgactgcaggttgaaaccacagaaagcaaaaccgtggataagggggactactaagaaaacattagcaagtcttggaacatggtcagttagatggtggaggtggttgcttttgttttgctattgctgctcaggcaagcagggaattttgaagatgactgacagtaaagcacctttaactatttgtgaaaatatggaaaagctctgtagaaattactcttctcaatagcagagatacaggaggagatttgggtccgggtgaattgcacagccagcctcaacagttagcctcaattgcaatttcagatcataaaccatgtgtcccttgattccagatctcctccaagattgtaccccctgtccccactctccagctcccctgtgcatttcccttcatcctgtgttcttgtggagtcctggaaacccaaggctggaaactacccagaaagacaaggggtggtgtgggagacccgcgattgcgtgggctgtcaaatgtttgcgaaacggcagctgatgccagaagaatcggccaaaaatggaatgggtgcccttgattatatttagtgtgtagtcttctgtaaattcacatgtttccaaattattttcagcactctttgttttgttctgtttttggtccttagctattcatgactttcctgatctcaaagcccagttggtgacccatctccacagcttggaaaccatgtggggttcggctattgttcatgtgtctttaactttgcagcacaaatgatagtatttcctttgttacactcattcctgaggccactgaagcatttgatagttcttactaaaaaagattagttgttaagaatcaaaagaggaaaatcaaacaaacaaacgaaaacgaaacaaaacaaaatgtcccctccctgctatacatacagcgtcctggaggaggctggccaattatctggctccaggctccagacttcaaacaactgggcaaaaagcacccgtgctctgacccagctctgccgattgctagcagtgtgacttcagacaagccacggatccctctgagccttatcctccttagctctgagtgggtaatgacaccagcctgctttcctcactggatgaatatggagatggaaattagaatgcatctgcagaccctttctgaattgcacaatgctagtctgtaggggatacagatatagggggattttcctggcagatacaggagtcctgctccccccgtcctgtgctggaaacagacctgaccacctgatgatagcaccttctccctcagagcctagtaatgccccccagtccttctcaacatagagcgatgttgggaggaattggagaagtcctggtgtccaagtaccacagcactgcgaccgtggagtgagcgcccagccttgacagtctcctcccactttcttttggtagaagtggccccatggctgcagatgagcaaaactagtctgggctggtgtgaggaagcgccccgaatctgtggcctgggaagagcagctgaggaactgcaagcagctggtgttggaggtgatcttgaaaaaggacatttcccccagactttaaactaatagcaattagttgaatgagaccgcatatgtgcaaactgtcatctatgaaacacagtaatatttgttgttattaaatcaaaatgtcaaatgccttattagctttaaaaatgacatcatttgtgctgcagactcactggctgaggagttccctgtggcaggagccagggttcccactgtggcctcttgatctggggtaatgcctggctcataggtaagggctcagggtttgttgactgattggctgaagaaaaacaaaaaaaggaagcatgcattgaacatgccagtaattttcaaaagtaagtgtccacatccaatatccagtcttgtgtgtatgatgagatcacatgtagaggtgtttaccaaacattttaatatttaaatcaaacagcaatttgcaagactttagcttcattgtaagtaataatatatttggaacctgtgtttacagtactgtctatacataggtttaaaccacatataaatatttaacaatacaattaaaaggtcatgcttgtccatgtacctcctaaaatcctcttgttcatatcctctgggatccattgaagttctagtaattatatacttttgccttttatgcggaagccagaacaagaactcaagaaaaatttagatgacatttgagcagcttaaaacgtgttgggtgggttacagctagggtactctttcattctgatttacccaggacagtgccagtttacacctgttgtcataattattaatgtcattccctttcaatctcaacaatgtctttggacaataaattatatggtcatggtccacaagtacatggtcatagcctacaagtattaatagctggattggaatagaacacagtctttttattttttttttaaaaaatttaaatttaattttaagttccaagatgtctttttatttttattttttaacattgtatgtaagtgtgcatgtgtatgggtgtgtgtgtgtgtgtgtgggagagagagattgagagagagtgcgagagaatgagaatgattattccctgggggaccccctgcctggacccatcaaaaggtggcttttgctgaacagagaaaacagtcctggctctcatggtggctcatgttcaagggttgaggcttttgacctaaggccaggcctgctctcccaccatccatccagagcctggtgttctggactgccttccacttcactgacttggcactggcactgaaagcaccttgggctaaagcatgggttccatcagtcaactttgggccattgacatagtgcagttgttgcctggtataatgcagggcttgagaaacagagcatctattcagaaggcctgcctttgggaaggtcacacgatctcccccagtctctcatcagtgtcatcatgcatgaatactgattatggaaaataggctcatctaagtattaaaaattgtcaccagtgcccccaccccttgtttcatcttcaaatgaaaatgcaatgcaagaatgattacttttaaaagagtgtattgtcaagattaatttggagtttgcttctctatcatcattgtcatctggtagtccctggagttccaagcaatctgcccacttaggcctccctaggtgatgggattacaggcgtgagcgcctgcatatctacattttgagagcatgtagctattacatactatactctcccttataatcctcatttagtcttaattttacaaacatctatatatttgctgttcactaccagacataacctctgttgttcagtgattttggttgttttgaagcttactctctagtgtatttctcagaaatggctcgaaggaaaaatattccctgagttcttacatgttgcctgtgtcctttatacttgaaattaattcaaaaatccatggcttatattttcttcccttgaggatcttagataggttcctctattttctttttgcttacattgttttgtaaagtctgatcataatattttttcccttgtaagtcacatgttctttttgcccagatgctcgaacaatttttccttctaagatttagtaataaaagtggacctgggggccggatgcgatggctcatgcctgtaatcccagtactttgggaggccaaggtgggtggatcacctgaggtcaggaggtcaagaccagcctggccaacttggcgaaactccatctctactaaaaatacaaaaattagccgggcgtggttgcggctgtctgtaatcccagctacttgggaggcggctgtctgtaatcccagctacttgggaggctgaggcaggataatcacttgaacctgggagacggaggctgcagtgagctgagattgcactattgcactccagcctgggcaacaggagagaaactccatctcaaaaaaacaaaaaaaagagccagaatatctcagcatctcagaaagcaactatcataaatttttttaacactgcatgagaacaacagaagagggagctctgaagtgagaaaagctgctatgaaccagctttgttcctaaatgtttaggaaaattaatttcacttaacaacaaggtgtataaaggatggaggtgtacaacaccacacaaagacaaagtaagttgggaggaagaatgagcagactaacatctctacatcagcacaacaaaaagacatacccacagaacagattaaaaccatatcctactccggggcgtggtggttcacgcctgtagtcccagcactttgggaggcccaggtgggcggatcacctgaggtcaggagttcaagatcagcctggccaacatggtgaaaccctgtctactaaaaatacaaaaattagctggacgtggtggtgcatgcctgtaatcccagttactcgggaggctgaggcaggagaattgcttgaaccctggaggtaggtggaggttgcagtgagccaaaatcataccattgcacttcagcctgggcaacagagcacgactccatctcaaacaaacaaacaaacaaataaataaaaccaaatcccactattgtcaaaatgaactaaaacattaagaaagtgatacaagatatgagagaacaatataaatcaaaacagaaaaatcttggaaatgaggtggcagaagtgaggaaagcattggaaataaaaaatattttagaaataaagattaaactagaaggaacacaagagcaaataaacacaacagataatgccttaaattaagtagaaggtaaacattaggaacattgtaaatataaaaaataggaacattgtaaatataaaaaatagacaaagaattcaagagaaagggacacgctattgaagataggcagaggagagcttgacatatgactactaggcacccctgaaaaagaaaactaaagcaggaaaccacaactagtacttgatctatagttcaagagaaattgcctggaatgaaaaggatttgaaattccatattgggatgtcacatctgagaatagtgacccacaatgcccaacacccaagacatactccagtcttgtctcatatctgccatgcctagtaccatgcctagtaccatgcctggtgcatagtggatgctcaaactactgaccaaatatattaatatttggtaaataaaatattctcgaaaacacctaggaaatgtaacagtctttccttatgtaacaatagttttccttaacggtgactgttaccctggatgagaatgggaatgttactgtaagctgttatggactcagttgtgtcctcccacctccaaaaggtgtaggtcgaagctctgattcccaatgtgactatatgtggagatagggtcttttagaaggtaattaaggtaaagtgagattaaaagggtggagcctggctgggcttggtggctcacaccactcatgcctgtaatcccagcactttgggaggccgaggcagttggatctcctgaggtcaggagttcaagaccagcctggccaacatagtgaaaccccgtccctactaaaaatacaaaaattagccgggcatggtggcatgctcctgtaatcccagcaactcgggaggctgaggcaggagaatcccttgaacctgggagatggaggttgcaatgagctgagattgtgccactgcactccagcccgggcaacaagagagaaactccatctcaaaaaaaaaaaaaaaagaaaaagaaaaagaaaaaaaaaggtggggccctaatcctaatccagtaggaccgatgtccttataagaagaggaagaaataccaggaatccacaggcacagagaaaagaccatgtgaggacacagcaacaaggcagcaagccaaggagagaggccatcagaaaccaaccctactggcatcttgatgttggacttctcagtctccagaaccgtgggaaaatatatttatgttgtttaagacccccagtctgtggtactttgttatggcagacctaactgattaatacaaattttaaggtttgggttactccagcagataaagaactatgactagttgaggtgcttgctgaaggcaaagggaatacagaatgggtagtggaagaaggtagttgttaataactatgaccgtgtgatcagttacagaaatgagcactgtaattatcatgagtatttccatatttggttatgaatatgtacgtgtgcaaggcaaatatctttggtttcctccctctgttatcctcttgtcatgtaatgtaagatgtattaactttatatcatagtatttaagttacgggatatcaaggagaagaataaacagcatggagagactttgcatccctttctagtgttggatttggttgtacacaggttagtttttatcatactaggaagaagtatgaccttgttgttgttttcgtttggagattaagcatggtttacagagatgcgtgcgggtgccaagttgacaaggacttgagatggttaactttatatgccaaattacaggacattcttggatgagattaatatttaaattggtgaacaatgagtaaacagattgccctctataatgtgggtgggccttgtctaatccattaaaggcctgagtagaataaaaaatctggcatcccagagtgagaaggacttctccagcagactgtctttgaactttgtctgcaccagtggctctcctgggtctccaggctgccaggctacatttgaacttgccagtctcggtaattgtgagaaccagttccttagaataaatgtctctgtttacgtacacacacacacacacacacacacacacaccaggctacatttgaacttgccagtctcagtaatcgtgacaaccagttccttagaacaaatctctctgtttacgtacacacacacacacacacacacacacacacacacacccctcatcctattggttctggttcaaccgtaatacacaatattcaacattctataccaaaattatgttttttttttttttatgtgagtgggactatttctttttttgtcttttaataatatcaaagtggttcattatgaccctagataactatagacaactctttagttacctttttgtttgaaaacaattatgccatgatgaaacttttgctatcatggtgtcccctgtgctttcagtgggtggtggagcacccaagactcctctgaaaatgtaatgggcaaattcatttggtagggttccccagagaacactgtttttctctgaatcattatgtgcttttcgtgtgaagtctgatagacttgatggaaagtagctgtgatcaactagcccatttagtgtcattgccgcagttttctctcctccttgatttcaggactggttgactttgttctaatgtacatgctgggatttccaggcaaaatcctgattttgtggtcagtggtgaacatgtggttgataagtgacaaacacagaactataaatctggcaatgtattatctaccggacagttgatgagagagtagattttaagtgttttcaccacaaaaaagtgatgattatgtgaggtaatgtctgttaaatggcttgatttagccattctaattatatatatctttatcaaaacatcatattataccccataaatatatacaattttttacttaacaattaaaataaatactttttttaaggagcaaggtcttgctttgtcacctagactggagtgcggtgatatgattatagctcactgtagcctcaaactcctgggctcaagtgatcctctcacctcaccctcccatgtagctgggactaaaggctcatgccacaatacttggctaatttttaaattttttttgtagagatggagtctagacttgttgccctggctggtctcaaacttctgggctcaagcagtcttccctccgtcatcgcccaaagtgcttggcttacgtaaaataaatattttttaaaaagaacaataaattcattttatttacaaaggtgataagcatgcaactcctagggggcttacagtctaggagaggaaggacaagaagcaaatgaacaagaaaatatcagacagtgagtggtaagagctgggcagagaaagaggcaatatgccagacagcagctgggtagtgagttggtttgagtgttcagggaaggtagcatttaatttgaaggccaatgacaggaaggagtaaagatctgagtaaagagcattctcagtaggagaaacagcgggtgcaaaagctccgaggcagcactagcctacagactatgagcacagataatctcagccatagactcttaggggagagtggtcaggggttatgtaagtgacttaggcagggtcagataagtagggaggtcaggaggaggttcagctgggtttggtgcctgcatgacactgatcttgctccagtgttttgaaaagagggatggggtgatattggggtgagagaggaaagcaggagagcagtgaagagtcttctgcaagagatgaagtcttctgcaagagtagactgaggccatgttgctggaggtgggagaaacagagtcaatctctatcataggtgcagggcatctctaactcttttattaaagtctatgtatttgtattttaaagttaacagataacaagtatatctgtataactgtcttaatttgaagccatagattattttgttttgaagaagatgacaaacctaggattccttttggaaacattattactctcatctgccactgttttttgaggatctgcagacggtggcattgtagtgagtgagaatgagtgggaatctgaaatgtcaacctattttggtcaaaagggctctaggagccttctcctctataccaattccatctcatctagctcctacagtaatttcacaaatcgtgtaacttcattgccttcctaaacagtgtttagttctggcccttgacatctgtatcttctcacttgaatctaaataaatgttgttaccttggaacatgagtaagaactgacatggagcagcgttagtaataagtgacctggttcccagaggctagttagataaatatcaaaatgatactgtcataaaacgatttcacttataagacagaacaatagtgtgaaacttgaagacctgctgggttatagcgaggccctggtgttttactgttccagcttgcctgttgaaatctgcttggttctagtatttgtgtgtttatgtaattttttattcatgcagtaatcttttttttagaaattctccttaattgagctcccaagatacactgtgtaaagtatctggatcccagtggttccaatttctctttttgcagagctagttttttttttttttgtacgatactctccgtctctcccattccctttgtactggtttgctaaaacacaggtagatccttgaaggaaaaatctttgttttcttgcaggatgggctagtgattagattgtcagaagtctagtcctagatttaggttgggctttttgtaatggattttataccagaaattatttataattagtcatactatggatatacaaggacttacttgtagaaaacagcagcccaactcattacagaaatatgataggagcatgggatcagttgtgtctcatttctgtggccaaggaaaataggctggtgtcttagctgatgtccaataggttttatttttactcattctttcctttgttttagaagtgttttagggacttctgtaaagacttcaactggccagtgattatgtcactaggactcagctgcagtctcttaaaattagaattgtgcacactctgtgtgaggactttggttgtctctctcctgtctttggtctctgcaggctgcctgccctggcacatggaactgcctttctgtgctctctgctctgttctccccagggaccagccgtatgatatagttcccctgccatctccctgtgtccccccagcttgtttgttgggcatctggtgaaagcctgcagcatgcttcctgtgctcctaccatcctagaacctgcagttgaccaagggcaccatgagaggggtgttgaggccgggaagtagagaggtagcagaaagagaagtgcagcaggattaagccccccgggaaacacatagtccatctttgctttcatcaatcttggtcttcatctgaaatcatttcctggctttagcaacctgcccacactttcagagactttgctggtcttttaaagtcagtatttgatttaatattcttcctgaatcattcggtgcccattttgtttacatgtggctctgaaattggtcctttaatattaaagattcaaaactgccctgagtttaaccaactctttttttttttttttgctcagatcatctttgttttaaaatactataatgacactgtatttttaattaatgagtcttgtggtgttaattctttctgagagcaagagagtatgggtgggtctctattagtgtgttctcaccttgctataaagaaatacctgagactgggtaatttatgaagaaaagaggtttaatcggcttgtgcttctgtaggttttacaggaagcacagcggattctgcttggcttctggggaggcctcaggaaatttacagtcatggcagaaggcaaaagggtagcaggcaggtcacatggctggagcaggagccagagagagagtgaagggggaggtgccacacactttcaaatgaccagagctcacaagaactcactattgcgagaacaccaccaaagggatggtactaaaccattcatgagtgatccggtcaccttccaccagggcccacctccaacactggggatgacaattggacgtgagatttgggtgggacacagatccaagccatatcagtgtctattcctgtcatatgtgttttgatttggaggaagtatttgtgagcttgtgtacccatatgtgccttttggaggacttaaaggatagtgaaattgggataatgtaccctctaatccaaggactatgtgattccctgtttttttttgttttttgagacagagtctattgcccaggctggagtgcagtggcaccatctcggctcgctgcaacctctgccacccacgttcaagcaattctcctgcctcagcctcccgagtagctgggattataggtgcctgccaccacgcctggctaatttttgtattttagtagagatggggtttcaccatgttggccaggctggttttaaactcctgacctcgtgatccagccgcctcagcctcccaaagtgctgggattataggtgtgagcaactgcgcccggccgatttcctgtgtttcttacagtgagcggctggtttaggtgttggatgggctcaaaaatatgtattttttccatttccctagagaatgttgatgctcatagagaccacttgagaagcactgctttggggagggatgctctcccatcagatggcagctttgggtttgccagtggtgagtttgatctctggaggatcatcttccatttccagatagggtactgaagatagagtggttcattatcttacaatccagtgcttcctccctacttgtccatttccctttcaagggggctggcctagggaccagtgagaactcagtcaattagcttctgataaattgtttctttttaaaacaatacattatattaactctggaggagtgcagtgaggtatccaccaaatgcaatcttccagtagcttctttgtggttatgtttgtgtgcctgcctgtattgatgggtgaagataaggacttggtcaaattacctaacctttctgagcttcagtttccaagtatgaagatggagatgataataatgcctaatgcatagggttcttcagaggattaaatgctaaatgctaagactagcacatagcatgccataagtgctatatgagagttagttgttatgagtattactgttgttaccaacctatttgaatcaaagtaaaaatcttccttgtcagaaattcacaggaatcaacaaggaagatatgggaaaatgctgtgcacagcagcttgtatactctaagggagttggtgcaatttctgggatgagcgctgtccttacctgcaatgtggaggctttatcaatggaatctattgtgaagagcattaataggacatcttcctgtcctccagccccagctcaaaggtgctgccaaatgcagataaaagcactggagtaacctcagttgattattgtctacctcctgaatctctccatcagtgaaattaatatttggttgctgaggggagagacaacatctgtaacatttcccctgtggaatggctgtttggtttctattgcacacatttttctctcaggttaaaaactgttgaaacctgatttccctcttttaaaaatggaatcatgtttgattttatagtaatgtttatagagctaaggagagttaagagtcattctggcgttaaaaccgtctaagccttcaaataaatatattgttgttatcttgaaactttccaaactgaacttggaattcactcaggcatcttatagagctttgatacatcagagggggacagtaatgatcctgtaaattcctagcaacgtgggaccactcttgcggcttgcaaagaacagaatgaaatgcggcataaagacttgcactggcaaatgtccacacaagtattaatctacttctacttgaagtaaggtcccaattacagaagatttattttgaaagaatttggtgtatgatcatcatctctcctctgagtgattgcattcacctcctgactggtccatctttcacaattcctgggctatctttcctgaaactgttctcatcagctcagtcctttgcttgcaagtccagcatgagactcccattgccggtaacaaaagtacaatctttgggcctttgtattccagaaccttccctgtctgcttcccaccctactttattgttctccccatattccccgctgcaggcctttgcttatgttgtttactctacctaagagcctcttctttacctctactgccacgtactctgggaatctctcaaatcatctcaaatgtcttccagtaaagtcttttctaaacacattacttccagaattaatcattttacccccctgtatagaaatggatacatgaggttaagcgaggttaagtaacttatccaaggtcacagatccagtaagtgtcagagttggggtgggcaatgagacacataatgaaaaaaaaaatgcaaaagcatagttggaaataggaagtcattgttaaatttagggacaaaaaataggctttgtgagaaatgaaccactgggctatagcctgagaaaaggttgtatacacaggatcttggaaagggaaggtccttgaacctgaaattggtgacactttttctgggggacctgaaatcttgtcactaggaaggtgtgtggtgtggtcaaaagtgctatgtgaagtcttgttgtacctggaagaggaagtcctcaggattgaatgcctcccctttctctgactgctgattaatatgcctagcattccattattggaatgctaagcatatgggaattatttctatcctactgctcaaggtcatcgccaagatctgattttcaaaatccaaaaaattgcaaccttcaggcataaatgggctagggggccatgtgatgaggaatatgggcagcttttgtgatcttctcatgccgtataggggctgtcctggatatggcagaccctgattataaatcaataggcatttgagtgaggtaaaaagaaagcagttttattagggttatgtactattgtaggtctccccaagtttatgctgcttcccagagggtccacatttttctgtatgcactagaatatgatgaatgacacacacctgagaagttcacattaatggcattgtgctctctgttactgacaccatcaacatcgaaataaagcatgttcttctcttgtcaagaccactgtaaggagtgagactccgtctcaaaaaaaaaaaaaaaaaaaccactgtaagagcagcctctacaaaatgagctgtcttctttccagtgcactttcttatccagaaggtctgtagaaaaaaataaggagcctctctgattaacaggatacaatagaagtatggagggtagttttccacattatttgtcgcactttttgggtcagtgctggcactttataaatctgcgtttggcccttccttcatccacttggactgattttcagggtacagttagcagggtctacttatgaccactgaagcagaaatgcagattcaatgagtaattattaagaactttccagaatattagctgtttcacttgctgcagtgactagtgatggaatagtccattagacatttctgttcccagcaacttctgagaattgattccaatctgaagcagccaactgctttgatcaatatcataattactcttattgatggattgttttacgatggtagccatcagagcagtccgtcagctcagaaggcaccagaactgtcccctgcaagctgtaatgtacggcaaatatctgattcaaatcaacttactattgaggccaggatgacaagcgtgaaattaattgttccacttcatgtaagacctgcattcttcttttgagagagtaattggttgctgcatgtagcgtgagagctaggggagctttccctctctgaaatgtttatagacttatttttttcccccaccagctatttttttttccctacgcttttaggtgtcagcaatgttgcacagctgctgttcctgccgttgttgtttttttgtaggtcttgtcatgtcagagaggatggttttcttctagaaaggttgattgcagacagagtaattttttttcatctgaaaagcttatttgtgaaagagggagtttgctggccaacattaaagcaagaaaaccttaagagtgtttcaatgagtataaaaaaataaatgggcaaagggcagtgggccccctgttcttccatggttgcaataggctaattcagaaggtgtaatggtcttgctgagcattttctgcattcagttgccttcagaagcttgttgatggagaaataatgagggaaatccaggtaggaagtcaagaaggacaatcgaagaaattagaaaatggggatagtccaatagtccctggttattcagtcctcatcgacaaattgaccattacattggataaaatcaagatcccgatagaacttgagagaagtgttttgaggtatttttataagtaaattcaagttcatagctggtgctggaagataaaagggctgtagaaacagaggagcatcaaagcatagtaaccttcacggcctcaggggctttctgaaaccctggttagatggctatcctagtggagttggggatttctagtacaccagtacttctaggaatggtaatactttttgttttaatatttatttattatggcatttccaagttgggccctgtgagaattgattatggaaaaaaggattctgtggacagtaaattccatatccaaccagtatttattgagtgcctgctgtgtgtaagcactgtttaggtcctgggggtgacccaagtaaatgagagtctgaacccctgaagcttaccttctcatgaaaagcttgagaagacaaacaataactgtatacccaaatctgtaaggcagtgtcagatagtgttagggatggtggatggcagaggatggcaaccttgtctgatgttggagaatgaagttcaagtaagagtaaggaaggtagatttgacttcaacccagctcatgagcctgaagccacctttaccattaaacttagtttgtctttgagatgttctagcagcagagctttcctttacactttggaaggaagagatttgatgctatcagcattcagtgcaggaaaaagatccaacataaaatacatagctgagaatgttggggatagttttaaaggtaagtgattctgtttctgcttggtcatgtaagtgtttgaaagtattgattgaacactttcataacacctgaagggatcagaagtgattaataataaataacctatgatagcaaaactcagagaagtttaaagccccagacagtgctggctagggaggaagattccgtattactcagttgcatgtgattagatacagcacataaccttgttaactcatgtctctgccatactggactgaggtagctaaagtattaacctgatcaccataatttcctatctcccattttctggtttctttgggggaaactttttctccttccatttgatgctggggtcccataagcttcagccacaatgtgggcaggggcccaggcttggcccaccaatgtctcaccttaccctggagatagagttggctaaaaaatgggcttgtgactcaggctaggccagtcagagccttccctgacttccctccaggagctagtgggaaagatgttatttccaccaggttggctaagctgataggatgagagcctggcatggtgacacggacctaactggcttctgggatggctgctgatgaaaggaagtcaagcagagctgagagttttgatcaagagaaaaacaaacacagcaggtgcagctctgatccacaattgtgagttcttaattctttaggtttgcttgtctaaacaagtatacagatttaatagaaaaaaaaaccctcaaaaaaagaaaacttgagatgtgcttccacttaattaagccacactggtgagatttcatttctgctggatggagagccggatagaaatgcttttaccgtgtggtgggattgaaaagaactcttccagaaggatacagctgagccaaaaccaagccgcttgttcctaggactcatgaggctcataccatcatctctggaagcacacttatcatgactggaagatccccttaagtaacttttatgatgacagcattgtaaatatatatcataaatactttctgtgaaggaaacatacaaaattaaacgtccatttagttgaaacagaagcctgccaatgcatttatgtggctgcaaaatagggatttctgagaagagtgacaaaatttgcagctgctgaagcaaagccctgcattctagctgttggcttttgcaatgctcaggaattttcaggcgtgtttatggaccagctgctctgctaagattccttaatgtatgggcaggggaaacttgaataaatatgtttcctcctccttctccttgggaattcagaatctttagccctaacttctaagaattaaaccaaacagtgtttgatgtttatagacgtggagtcagctattagccacttgaaccatttgtcaaatggaacaagatgtgacaaatttttctactttctaaacagaaactgtatttgttgtattgtgcagagatgtcacactttggagcctcttctactgatctcttttttctctgggaactagacccctagaattgactgcctcaaattcttagcttggttttcaaggccccaaggatgtgtctctgtcttaatctattttctgttgctataaacagaatacatgagaccgggcaatttataaagaaaataaatatattttttatagttttggaggctgggaagtccagggtcaaagggctgcatctggcaagggccttcttgctgtgtcataacatggcagaaggcagcatgcggcaagacagagggagcgtgtcagttcaggtctctcttccttttcttataaagccaccagtcatataatgaaggtcccgtcttgatgaccttatctaatcctaattacttctcaaaggttttacctccaaataccagcaacatatgaacttgtaaattacatttccaacacatgagcttcgggggacacatttaaatcataacagtctccttcccctcacgtctcctactattctccgtagtgctcaacaaggctgtggccatgctggtattcttttttttttccttaaacatgccaagccctttcagctcaggagtttgactctcacaatccctctgccttgagtgctctttccccacttctttgcacacctggctcatcactctagtttcagctcagatatcatctccattagaggagcttgccataaccaggcaatctaaagtcttttgcccagtaactctgtatcatgtgactccgtctcatttcctccagttcagcttgtctgaactctgaattcatttcctgtttgttccctctttctcttcactagaatgtaaacatcatgagaatgagggaatagtctgttttattccctgctatatctttgacacctatgtcctggcgcatagtagatgctcagttttatttctattaagaataaatgtctagatagcctactcattcctctgagccatggcaccatttaagtaagttaaacaatttattttagcatctctcttcagcttctctattatacagggcaagtggaatggaatattcacatggatgctttgattcttatttaatccttacaaaacctttaggaaccgagaatactcaagcccgtcttctctccacatctggtgtccagttttattttttggcacccagattccttcttggcgcttgttaccatggggaggaactaaatttgtcattatgtgtttactatcttcttcctctaccagacccttagtcttggtcctaggactgcttttattaattgctgaatgctcccagcctggcagagtgcttggcatgcagtggttgctcaaggtgttggggataatcctgaggcctaaaccccttattctgcctggtctggacatgggattttgcagccacagaatctccctatctgaacaaatatatgcttccccatgggtggaagaacactaaaattcctcattcacatgtgcctttgcagggatagaaggagacataaagtctttcacacccttagcattggcagcttaaattcagaaaggtctctggtcttgtgtgttcagggatacaaagtcacattctacctctcactatccttggtgtgtagaggggaaagttaggattgtgacccaaaatacacagttatactttgaaggacaatatgctagagtgtttgaaatcaggtcagtcctggaaaacatggaatgcgtggtccccatacttcccccactggaattgcacagacccccccatggtgcctgactatgtcccatcctaataagccagtcaaggcaggaggctctttgcagccccacatgtgtctcctgggggctgtgaatgcagttggggataggggttttgggggagggagcaggagttttgattttttgctgctgctctctaaggaattcttccatatttcactttagcacgttcccagaacccacgacaggctgtataattgctggactgacataaatctatagcaaggatgggtagattttgctgatgtgtttgctttggcggcagggcttggtagaccatgtctgcatatcatatcacaaactcaggctgtggtaggacagggcaaggaaagctatttattgtgtctccaaggtcgtgatgtgagatggaagaggcatcataaaagaaacaacattgaggcacagagagttccccgaagtggggaaagtggaaagatgaaagaaaacatttcctcccacgatggacccacaagagggaagctaaaggtcgaaggcaggcatttattcctctgcatcacaaatatctataatttaaacatgctggttaaaactcagactttgggagtttttacccattgtttcaaagttatgtaattaaatatgttcaggctttcaaaagagatacagaaaaatgaaagaccttaccaaattgcttaaagaattttgaattaaaaaaaaaatccattcattcaatctgcagacatttgctgagcatccgtcgtgtgattagcactatgattggagctgggggacacaggggtagtgaaaaggcagatggttcctggccaagcggaacctgtggtctagccaagaagaagccattactcaagtaattatggtttcctccttccagcaaccgcatggcgagccacctcccagtgctgggagtggagacgatgtttcttttttcatttcctttttgtttttatgtttggtataccttttacaagtttgctttaaatttttactaattatttaagtaaatcaggaatctgcttgcttataattagaacattacagatcaggattcggctcttgttgattcccctccaccccaggtagtcactatgatggatttatactatgactttgcagagaaattttgttatacttccacatgtgtgtggtgtgtgtgtatatactcatagacagcttctaccactgttctaatacaaatgaagcacatgctatgcatctattattgtgcaacttgcttattttgttgcataataccttttttattagtttttgttgatacctattaaggtagttggttaacttttaattactgaaagttgtgcttattcatagtcctatttggaagcttgtatggtggctactgtgtagagacttggaatagtaaaaattaatagtcagaaatagtatacatgtattaagtgcttaatgtttgccagacagtgttctaagtctctcacatggattgtatcatttaattatgagagcatctcagtggagtaaaggctatttttactatgattttacagaagagggaatctgaggcatgaaaagataaagtaacttgcccagggtcacacagtgaggaagtgatgccaagatttgaagtgaggtggtgcattgccagagcccaagatctgttggttctcttaactcctatgatttctgggattttagttgttaaattcaatctatgaagcagtgtgtgacagatgtgtgattcactgaggggccaactgggctggtttgtgggtttctcagtttattgatacagcaaacacatgttgtgcacctttggtgtggtggattctgcgctagaccccggcaacacagcaataagatggaacacacagccttgcctaatgaaactcacagtgagagatgataatgctgaataccatctacataaggtacgcatgatgtctgtacctggcagggctggaatctcatcccctctggctttatatggtctttggcctgtgttttctttcatttttttcttgcactttagatgacatttgttaaacttcattattaatagggatccattagcatggttggaggaaaatatgccatcttgtagtgacaatgttgccttctatgttacatccatacaggcagaaggaagagacccagcagcatgtcttgaatgccagtgttttatccccacttgctgcccagccacaatatggcaaatttgctattcatccagcccaatcataattaacataatcggctctggtgcccacccagatgtggtgggtggtgtcctcggctgattacaaagattgcagcccagcattttgggaaactgctcttacttcctgtccttgtatcacttctgtgggctgatttttctgctcttgtgttgaaaaacgaagtcatggaaaggttctcttatattgaatgtgtcttgtgtaatgatgaaagttaaccacagtgtctgtgatttttttctttgaaaatcaggagactggttaaggacagaaggaagtgtaagtctctcagctttgaactctaagctgcattcgttttcctgaaggctcagatcaagggagcatgctcatcttttcttcttatttggacctagaataatcttccagcttagcactggaagaggtttaatgtctcactcgtttctttttctttaagttttttcttggctattaacagtaaaatagaaacggagacatagaggatgttggccagactttttatccagtatttaggtttgtaataggctcagtgcagctggtggctttatattagctgctgtgaaaggtatgtggttcttatttatgtattatttattttggaaacacttaggtaaattacatgacagccttttactttttagtcagttgatccaaacactaccaagttttctttcattgccacaaaaaccgcattttaagagatgcatttggttttctgttcttgtgatactttgctgagaatgatggtttccagcttcatccatgtccctgcaaacaacatgaactcattcttttttatggctgcatagtattccatggtgtatatgtgccacattttctttatccagtctatcattgatggacatttggattggttccaaatctttgctattgtgaacagtgctgcaataaacatacttgtgcatgtgtctttatagtagaatgatttataatcctttgggtatatacccagcaatgggattgctgggtcaaatggtatttctggttctagatccttgaggaatcaccacactgtcttccacaatggttgaactaatttacactcccaccaacagtgttaaagccttcctgtttctccacatcctctccagcatctgttgtttcctgactttttaatgattactattctaacacaggaacagaaaaccaaacaccacatgttctcactcataagtgggagttgaacaatgagaacacatggacacagggaggggaacatcacatacctgggcctgttggggttgggggataggggagggagagcactagggaaatacctaatgtagatgacgggttgatgggtgcagcaaaccaccttggcatgtgtatacctatgtaacaaacctgcacattctgcacatgtatcccagaacttaaagtatgtgtgtgtgtgtgtgtgtgtgtgtgtatagtgtgtatatatatagtgtgtgtatatatatatagtgtgtatatatatagtgtgtatatatatatagtgtgtatatatatagtgtgtatatatatagtgtatatatatagtgtgtgtatatatatatagtgtgggtatatatagtgtgtttatatacgcacacacacagatgcattgttcttttaaataatgcttttacattttggtatgcatatgaaggcaaaaaaaaaaaggaaacaaagtatatctttttctctccagttagaacccactacttgaaggattttaaatttcagacagacttaaagccttttgaggttcaagtttagtgtgctgtaagcaaaacaggcagtttcctagttcaaagaggaaggaaaattttaagacttataaagtgctcaaaagccttcttaggtatcaaatagctttcagaggaagcatttgatggatgaaggacacaaggattagaaaaatatgggccaattttttctttatataatcacatttaaaagcagtggaaaaagttcttaggtctagggacttaaatcagtgacttggaagtttttggttgttgccaaacccagaaaatgcctggtttggcctgagctttgtagaagtgagaagtcctttagccatctccactgtgcatgaaactaacatgagggatgttggaacatgagatcttagtaatgcttcttagaattggagttgggtaatgtgctacctgctgtccataataaatttacaaatatttttctagttattatctcagacaactgaaatggaaaataaggttaagagaaatatgatgcggcatcaaggaatcatttaagaactctgattttctgaattcatgtgttttaggttttggagtttcatgttgcctgaagtgtactctgccctgtggaaagagaaaggtgttgggttatggttgtggagaacacagggccctcttgttgcatgggtatcttaggaacgcaagccctgacctggtttgcattagggtctccatgttcacaccaaagtctgtcatgtattcatatttgctgatgagtgagcgggtgactagatgaatgaatgatttcagtagcagcctagtccatgcagaaggacagaattcaaggccagagggagtgacctcagcaggtgatgtatgccctttcttactttagattccaatttgggtgtcagcatctgctaggtctctgccagctcttggttactagagactggcttactccaccatcactcaggtggcccttggcactcatgtggcagcagcttgggcacatatcagtggtttacaggagcaggcaaagcaggccctcttagggagagcatggaggggacagtggctttttttttgcaacacttctctgtcttttgttgactttaccttggtgtgccttgagcatggagcttggcagtttgtatacattttaatgtgaaatggggggaggctgtaactagtataaccaggatgttattttagtcactggggcttaaggatgaggcagtgagaaaaaaatacgagttttattaaaaagcaaatattaaagttgatgtttagacatttccaagtgtgacagtgggactcaaataatagaagtttgagaaacaatagttttgtgtactcatttgtactcagtgtgtttctaccttttacaattgacagattgtgtcttgcagtgtgatatttgaggtatggaaaacatactcagcctccttaagtaaccctttataaatgctctttagtgaaagtgacttgctgaagttgcaaaggaggctatgacaaaccagaacctcctgttctgggctactcgttacaatttaaatacatgggtttagagagttaataagttttccattggaggtgcaggctagattctctcttccagtcactgagatgggtggtcatcaagtttcagaaacatggttactgtgtagtagatacccagtacttcatctttttaagagtgaaaagtatcctttctgaaccagacagaagttagtcactgtttttcagaacctcagagttggatgtaagtctaaattcatttgatgcttttcatactgcaggctgatgttaaggtaaaagaacacccaatccctggctgttttaagcttttcttgtgctatatatgactgaaaacttagaagatgtttcctaagtgaaatatagaagatgaggtacctgtgatgttttggtggctgtgggacaggatattctaagtgatttttccagagcccactgctgagttattttttccatcctaaacccttatgatttttcagggatttgcaattcatccatataatgattttggggcttaagctaatggcactaaaacatttcagcctggaagcatgtgatgttttgggggtgtttttttgtaatgtttaaaatatgaatccctttggttgctctgagttagaattgatgaaaaaataaagaagggaaagcaaagaagttaatggtctgaaacctatggttggtatgtggttcatattcagaatcagaacagtgtgctggttttggcaattgggaatattaatattctgagctgtggcatggaaatttgaaaaagaggtttaaagaagcagctcatatgacaaatttttaatgggaaagaagctactgctcacgtgaaagaactgcttgtctgttctgggtcatacagccttcatgtgatggccattcaggggtcgttcgagctctgctgataccatgtccagtggctgccattgctgtgctgttaccacccgctggccactgcactgaggtgtggacccaatctcattgtgcctcactaaggctctgtgaattaggggcaattatttgtcaccattttattttttatttattgagatggagtttcactcttgtcgcccaggctggagtgcagtggcgcaatgttggctcactgcaacctctgcctcctgggttcaagcgattctcctgcctcagcctcctgtctagctgggattataggtgcccaccaccacgcctggctaatttctatatttttagtagagatggggtttcatcatattggccagggtggtcttgaactcctgacctcaggtgttctacccgcttggcctcccaaagtgttgggattacaggtgtaagccaccgtgcccagctgtcactattttagagatgagaaaactgaggcctgcagaaggaaaaggacttgttcagggtcacccagctagtaagtggcagagccgggacttgaactcagccctccccttgtcttctaatgattatgtcataggaaataggaagcagagcacttgggaacagtcaccttgaaggcagactaagtttggttctgaaacttagtggcatgagaatcttctggaagtatgtggcttcagaagggaaagcagtggatggagaagcccatggaatgggttttggtttctctccttgttatttttgggccaggaggacctgatgtggagagaagagttcctgtggcttggtttggttctttgcttttgggatccattgagcccctgctctgctcagcaaggaaaacagcagtgattggagcagccaaaccacagtttggggcctggatgtgagtgatcggtacaggtacaggtgaaagaggccccacctggatttgaattccactggtagcgccttttctatttcagggctgccatcccatcttggaattctgtggatgtccgaggggaggaaatattgctggatctagtgtgtgggcccctcttttatgatttagcatttctctatctcttgcagccttttcctaatttcttttgttctggtgtgagtttcctctttctcccatccctttgttgcattcctgtcttcctgtgttttaatgaagaataagataaagaaaagagcacttactgtgtactgcatactaggagctggggatgcaaagctaaacattgtggaccccacctttgggactgcacattctgaaggtgagggagatgtgcccacacatgattggtgtgctgtgatggcaagagtaccaaccaccatcactgtgtaaagcatgtaaagaaaatcctgcaaggagtggaggatcctgggcacctaggctggggatgcagacagtggccagggaagatgtggggaaggaggtgctgtctggaccaggtgtccagagatgaatgggagttatcttggcaaaaaggaggtggatgagtttttaaaagcagcttcatggaacagtgttagggatagaaatcacttgttttttgttgtttgtttgtttcatgaatttgattgatcaaagacacttaaaaatacagaaaatacttagaggaaagtgtctgacacttgagaaaagaccttaatacatggtctctgttgtgttgtcattatttagtagtaatcataataatatttagcagattttggccctgggcaacagaaaaataaaagcattccttggcttgttgtaccagaagctgaagcagctagtctgggtttgagcatggaaaaagccatacatgaacaccatctcattcagatcttgtgatgcttaggcgtgaaagcgttttttaaattcttctcgtgttcagcattctcctcaattgttaaattgttaaagcagcctttagcaaacttatctaggtgctgaatttgtaaatataaaagagaaagagtttcttttctctattttaacagacaacactgtttcataatttcattttggagatgatttagctttggctattgttttaatctcacaagccttgccttatataaatatagaacagaaatactgtatagcgagtgttgcaggaattaatcgacctgctttacgcatttgcttgacactgctcttgaatataccccacgagttggcttccaccattgccaccattcaacaagatgttgacggtcttcattcttgaaccatggctttgtcaaccatccgtaggagacccatttcagctgctgatggtatttctactcctgcataacaatttaggagaaatcaagtggcttaaaacgactcccatttattatcttacagttccataggttggaagcctgggtgggctctgctgagttctatgatcatcattagcacaaggctgaaatcaaggtgtcacctaggttagctcttatctggaggctctgggaagaatactcttccatgttcgttcaagttgttggctgatctcagttccttgcagctataggactgaggtttctatttctttgttggctttcagtccagggcatcttgcagctccttcaggctgccctcattccttttgacacagcctgcatccatcttcaaaacagtgcactgagtccctctcaagcttcagctttctctgatttccctttttgtcacccgttggaggaagctctctgcttttaagagatttgttttatgtattatttttatataaaatcaggaacagtaagtttccaagagatgttggaaggaggcaggagggctgcatctcatttgcatttttagaaggaattatttctaagtgacagctggtggtaacagaatgacagtgaactggaattgagagatgagggttcaagccctgattttgggaccatgtgtctagagagcagtgggcacgtttcctgggccttgatttcaccacctataaaatgagacagctgggctcttggggtcatactgtttttcttttcttttctttattattttttctcttattcacgtgctctcactctgccttccgctcacagaccttgctaatcaaccatcctctgttccctgctgagcctggatgcagtcctagaatccttttgacatggccctccaggaagtcaccaccaacccactggagttggcacaggagatgaaacctgtgtgtcatcccaacacttgaaggtcccatttcatcctaaatgctatgattctctgaaatgataaattatcatcttctttggccaaaaagacatctatagaagagccagttggccttttctttacttgtcatacagacatctggggagtgggttcagttttcaagccacaaattgaggtgtgcagaaaaagtcacttttttttcttctaattgaacttaatttctcatttgagcccttgttctaccaagttactgaagtgaaatccatggatttgtggtgctctctctggctctccctggagttgtatgcagttccaaggacctacatagagccaaggcatggtggtggagggcctctggtgccctgctgtcacctgtcagtgatggtgtttatggagacatccttgctcccaatcacctttgattttgtctcggagaaactgggccatgctaagtaacaaattcactccaaaagctctgtggaaaatataaaagttactttgttgcttaggcaaagtccccagtggcttgggcaattcttcagggagtcgtttatctagatagtgatcagggagcgagctgttttcatcttgtttcagtataaagcttctagacacccagacagggaagagaggactggaagtttcttgagtgtctcttaagtgctgggtctggatgggacacataccttcccatatccatgggctacagctggacatggccccgccaccccccatccacaaggaagctggtgtgtcgggagtgacacgtgttaggtgggcattaccagtcactgccaccgttgttgattgattttgagtcacttctttgttttcttgtacattttgcctcacctacctcaaggctagagcagttttgccagctctgtgtgcttcaccccagctgcttgcagccagtgagagaagctttccattcttcctggaccttctgggcttggggaagctgtggggccatctatggctccttaggccacctgttccacatgcatgtctttagcatcaaatgtgctggttgtgggaggaccatgggaccttactggcttcctacactgcttggagaacagaaggtgcaagtgatccctgttttcaggttcattaaacctattgtggggttcttctgttcccctcccagggatgagtgatgaggactcagggctccttcccacagatgcttgtcccagacacagctgggtctggctgcttggcttcccccgagaactctccctgagccctctgcttatgacattgcttcacttttgtgacatcgcttaatttttgtgatgttgcttcacttttgtcatattttattcatcagaaagaaggcaccaggtctaacccacactcctgaaaaggggattgcacagaggcacaaagacctctggtgtttccagtccgggtagactggctgtcaccactggggcactggtgggtacctgtgagctgatgagtgggaccaaacggctctggccaccttggaccccattcctcccaggctttgtctctccctgagccctgcgcttgagaacattaaaagccatgccttggacccccttgttctgagtcctgccatgggccgtgaggacagccggccactcttcctggtgagcagattgtcactcggctccagctgcacgtccagctcttccgctgttttgctcacggtaaatgcgtcactggagaagggaaggtggatttttgcagttccacgtgcctggcacaaggatatcatttggtaaggaaacttgttggagaatgtgtgaaggcccagggtttgttctttcctctcttccagctgtgcttactggctggagagaagggtttggattcgtctcgttactcttggctgctgggcccttcttcctttgtcggctgttcagaagtgggaaaatatatatttttttctccctctccttctttgtctctttgtctgtgtctgtctgtctgtctctctcacgcacacaccctccatcctctgatcccattctagcttccctgctttatttcccactgatttctttaatgccccaatcacatataaactaaaccattttctgttccttgcgttctggctcttgggtggtcctagttaaccagctttcacagggcagcgtttcccctttggtgtgattcacattaaaggtgagacttagacgctgtctgaagtgcaggcaatttactctggcagcaatctcacaacacggacagcaggagcaggctggtggccaaacacaaggtccagatgaccacccgactgggaagggtctccatctggcgaccgttctcggagtttgagggattcttcctcctttcttacacctgtactcagtccaggtcagttcccaggtgtttctttcataatggagctttaagctattctggtaagggtgagctttgttttaaggtttgtgaaagttgtgtctgtgctagatggccttatctctagggcaactaggattttgggatccagttgacatagagacccagtaatccctgggccagggctggaaatcccaggccaggttgcatcatactgctaagtgtgtaggtcctgtgagatgtttgagtgggcgtatggctgtcattaatcttatagccatggtatctcatagtatactacagtgtgtctttgtttgtgttagtctactggaaatgaccttctcttatgactctaacatttaccccattccttaaaaaaatctgctgtaaagcaatatttacaaacagaaacctggaaaatatacaaatatatatctctacatttgtagaatgatttctatgcatatatatatatataagaaatacggaaatgtataaagtagaaagcaaaaccccataactttatcacctggctgtaatcattctgattcattcttatagattatttttcttctttctttctttttcttttctttcttgcaactccctgatatgatgagagatccttgaggcccacttcaagtgcaagtctcctcagacacctttttatatcattattcctagccaaaagagatggtgtctttctcagtacccctagaatgttagtgctcctgctcgtcactgtgtgttcggggtcattgtattagttatctattgtattgcaaattacccccaaaattatctattgttgtattgcaaaaattactattgcaaaatagtggcttaaaacagcagccatttactattacacagtttctctgggtcaggagtctgtatccagctttactaggttctctgtccaggatctctgacaggctgcactcaaggtgtcagcggactgcagtctcacctgaaggctcggctaggggggaactgcatccaggctcacgcatggtctgagggcttccaggccttgctggctccctcagacctttgccacgtgggcctctctgttgagcagctcactgcatggcagctggcttccagcagagtgaccaggggagacagcaagagagcctttttgtaatctgatcttggaggtgacattgcttcacttctgtcatattttattcattaggaagaagtcaccaggtctaacccacactcatgggaagagggttgcacaaaggcataaagaccaggaggcagggaccactggggtccatccaagaagttgcctgccgcagacaatcctgcttatgagcctgtgctggactgcatgccgtcttgggcagagccctgccttatctttatatgtctaatgagatcgtgtatcttgtgcctgatgggcactcagaaacccactttgctgttccctctttcgtctctcatagcaggcgccctcttcttggcagcctctgccccggcccacctctgtgcctttgctggataagtcgtctcatgccttcaggtctcagggtgtgcacccctcccctaggcagggagtagttcttgacctcttttatgccatcaaccactttgacagtctgaaacttagattttttcttagaaaaaaaattcaagttcaaaaacaatatgaaaggcatagaattataaggaaactcaattataatgaaatacagctatcaaaatataaaaaacccagatttgtgatataataatatatgtgcttatttagtaacaccttaaatagcaagatgtgcagcagtcttaatttcaaaatagtgatgagaatgaatgctgttttgagatactgacagacactaaaaggtgataggaaagtatctgatttctttttttttgagacaaagtctcactctgtcacccaggctggagtgcagtggcatgatctcagctcactgcaacctccgccttctgggttcaagcagttctcgtgcctcagcctcccaagtagctgggattacaggtgcctgccaccacgcctggctaatttttatgtttttagtagagatgaggtttcatcatattggccaggctggtcttgaactcctgacctcaggtgatctgccgtgatctgcctgccttggcctcccaaagtgctgggactacaggtgtgagccactgcacctggccggaaagtatctgatttctactggggataaagttgcaggttcttttaatactaattttatttgtttactttaagaactcaaaattcaaggaaataactacaattcagtgcaaggttattaaaaatcagggttggattctttctctgacatcctgaagccccgattgaatgcccctccctgcagggatgggttggctgcccactgcacccctgagccctctactcttcccaaatgaatgtgccctgcgccctctcccactgcccccttgttgaggagtgaacagtcagcagggttcacactggaaagatgaagatgggatgagagagaaggaagagcagtttgataagaaaacgaagaaagaggccagacgcagtggctcacgcctgtactcccagcatttgggaagctgaggcgggcagatcacttgaaaccaggagttcaagaccagcctggccaccacggcgaaaccctgtctctactaaaaaaaaccacaaaaattagccaggcgtggtggcatacgcctgtaatctcagctacttgggaggctgaggcaggagaattgcttgaacttgcgaggtggaggttgcagtgagccaagatcacgtggctgcactccagcctggtcaacagggcaagactctgtctcaaaaaaaaaaaaaaaaaagaagaagaagaaagagagagccattagagagagtccatgctgattgtacaagagaagtttggtattttgaggcagggaaaagaggaattagggaggggatgagaggcagaaacagagtggcagggctggtatgggagagaggatggtaaagaagtttttttctgtgcatttcttccaggttaaggtaaaggtccaaattgtttattttctggctacccaactgttgcgtctaaacccatctctaggctagagctacaccctgaggcagctttccttgattgggttgcccactgatgaccaatgacggatgactgatgactgtacactgtggttgtttatgtagatgagggttgatgagctatggcccaccgcaggcatgccgcttcttgttgtacatctccagttttcaaattcagggcctgtcctttttcagatgctgtattactgggccctggtccatggcatggaggtggcacataatgacacagacccagtgtaccatcctgtccttcaggcctgggccagggaggcccccacacgctgccctgcaggactgggttgctgccattcacatgaacgtctgccctttcctccctttttaaaatcccgccagtgcctatgtcctgaatgatattgcctaggttttcttctagggtttttatggttttaggtcttatgtttaagtctttaatccatattaagttaatttttgtatacgatgtcacgaaggggtccagtttcaatcttctgcatatggctagccagttttcccaacaccatttattaaatagggaatcctttcccgattgcttgtttttgtcaggtttataaacgattagatggttgtagatgtgtggcattatttctgaggcctccgttctgttccattggtctatatatctgttttggtaccagtaccatgctgttttggttactgtagccttgtagtatagtttgaaggcaggaagtgtgatacctccagctttgttctttttgcttaggattgccttggctctacgggcttttttttgattccatatgaaatttaaagtagtttttttctaattctgtgaagaaagtcagtggtagcttgatggggatagcattgaatctataaattactttgagcagtgtggctattttcatgatattgattcttctgtacatgagcatggaatgtttttccatttgtttgtgtcccttcttgtttccttgagcagtggtttgtaattctccttgaagaggtccttcacatcccttgtaagttgtattcctaggtgttttattctctttgtagcaattgtgaatgggagttccctcatgatttggctctctattattggtgtataggaatgcttaaaacaccaaaagcaatggcaacaaaagccaaaatggacaaatgggatctaattaaactaaagaagcttttgcacagcaaaagaaactgtcattagagtgaaaaggcaacatacagaatgggagaaaaattttgcattctatccatctgacaaagggctaatatctagaatctacaaggaagttaaacaaatttactagaaaaaaacaaccccatcaaaaagtgggcaaaggatatgaatagacatttctcaaaagaagacatttatgcagccaacaaacatatgaaaaaaagctcatcatcactggtcattagagaaatgcaaatcaaaacccagtgtgataccatctcatgccagttagaatggtgatcattaaaaagtgaggaaacaacagatgctggagaggatgtggagaaataggaatgcttttacactgttggtgggagtgtaaattagttcacctgtggaagtcagtgtggtgattcctcaaggatctagaaccagaaataccatttgacccagtaatcccattactgggtgtatacccaaaggattataaatcattctactgtaaagatgtgcacacgtatgtttattgcagcactattcacaatagcaaagacttggaaccaacccaaatgttcgtcagtaatagactggataaagaaaatgtggcacatatataccatggaatactatgcagccataaaaaagaatgagttcatgtcctttgcagggacatggatgaaactggaaaccatcattctcagcaaactaacacaggaacagaaaaccaaacaccgcatgttctcactcataagtgggagttgaacaatgagaacacctggacacggggaggggaacatcacacaccagggcctgtcgggggatggggggcaaggggagggatagcattaggagaaatacctaatgtagatgacgggttgatgggtgcagtgaaccaccatgtcacgtgtatacctatgtaacaaacctgcatgttctgcacatgtatcccaaaacatgtaccacacacacaaaaacaccagtattgacagcccagctacagagcagacaagaatcaaattagcattctttaatgtacacggatcctgcgacgatacctaattcactgctataaatggacttgtttcctcattccccaaagctttactgtgcctttgtgaggctccaacgatggagagattggctgtgtctctttgatgactcatttaattcccagtttcatgagtggaatgcacaagtccaagcaggggtgaggtgcagattctgactaacgaatggaaataattgaaacattacgagtgatttcagtgacacctttctaccactcatggctgcaggcgggtgggcagcagtgaccttcactgtgtgtgtgggagtgaggaccaaacgggatggccctactagtatgtatgcccaaggagagctgagtaatttccccagggactgaggatttattaaatattggaatcctgacaagctccctctctgtgtctctggtactacgctcttcccagagatgaccttggctacactgagactgcacttagcttgcactttgaaaatggagctttcatttaaatgccttgtctccttgtggcgcaggaaggttggattttcaagaactttccatctctgtccccctgtctgttactggagagcagtatgtagtgccagcagccctgttgtacctacaggcatgagtgtctgagtagagctctggcttagtcctaataattgaaaccatttcgagttctagcatcttgtgcacagagctgtctctgttctcaaaacgagaatggagggccttgtcttgagggtttgggctttgagtagctgcctcaactccatgtggttggtagactgtgatcagcataggacctgaggtgttggttttgttgttggttttggtctagcctgcagcatcatttttacacgaagcaaaggttccctaaactgaattttataccctgtgttttcagtggtaggggccagcctaggctagttccacctgtagagaattccaacagtgatttctttgatacaactaagcataagtgaaaccaacaaagatgacttgtttgtttgtttgtttgtttatttatttatttatttatttatttatttgagacggagtcttgttctgttgcccaggctggagtgcagtggtgcgatctctgctcactacaagctctgcctcctgggttcacgccattctcctgcctcagcctcctgagtagctggaactacaggtgctcgccaccacgcccagctaattttttgcatttttagtagagacggggtttcaccatgttagcgaggatggtctcgatctcctgacctcatgatccgccctcctcggcctcccaaagtgctgggattacaggcgtgagccaccgcgcctggcctgttcgttcatttaatacatatttattaagcacctatgagtcttggacccaagctctttgctggtggggagtaggcagaaacccaaagaagttcctgtattcattaaagttctaatgtagtgtaggggggacagaaatgtgagggcctgaacactgtactaaaagagggagagtaaaggagtgtagtcagggcaggcctcagggaggaggtgacatgaaagcctagacttgattccccgccacagtttggagcatgcctgccacgcagcctcatacagtttccccctcaagtttagcaataacaacccttcccgactctgttctctcttgtgccctttgatctcttgcctttgagcctttgctttgctgttccctctgcatcattcattccctctcgccatcacctttcttagctaacgattcctcctcctttttgggtctcagcttaggcatcccttcctctgggaaatgcctttaatgctcaagtctaggatggagcccactcctggaaactgcccacacactccatacttcccttgctatggtgttgagcatactactttcttgcttttttcctttatgaggctgtgaactcccagagaatgaggactgtggctatactgtttattcctctgtcttcagcatccaccctagaggctggcacactggtttgtgtttattgaatggcatcatgtgcaaatgagtgctggctgaggccctggctcctaaacaacctggagtggagaggaggaggacagcaccatggggaagtgtgggaagccgacagtgtccacaggtgattcactcatctccattaggcataaggcgatgttgagcaaaacagtatcaggaacagggcccctgccctcccttgccacttggaagccatgatttatggcacaggaaggcatcactatatttttatgtagattcttgcacattttgtgactcagtatcttttccactgtgtatccagattgccgaaaaacacaaggctacctgcctgtgtcagaccacgtgggagctaggtatagaggcctggtgaaccctcccggtggcagagtggatcatgagggggaggaagtgctgggctctgaggggtgcaggcagaccccagagcgcactcaaacatggcagctctgtaatgaggtgatccttcattccttaaactgctgagcgagagctgtgcgaacagatgtgtgcccaccatggtcacgtggaacacctcagagagccacagaaaggccagttggtgcggttatgttttattgatgtcttcctgcctctgcacattcttgctgggaataaataaattatattttattgtatagaattaaagctgaaaatgatacagcttaagctctgtattcatgcagaatattaggaggtgagctggatctgaatcagtggcatttcctggcagttaagaatggatgttcagtctccgtgggtttgatgtgaccagttgacaggaagttctactgcattgtactgacaggagttaacactgctcagcagatagcacagagtggaggcttccttatgtgtgttaaagcaaagtgttcattgctccctctctcccgacatttataaaattaaaaagatagtttattgcttaagtggtctcagcaaatcaaagcatgactaaccacagcagtgatgacaacaaagtgtatactgacatagaaggctcttcatcacataatttgtaaaaggcacttcttcataaaatggaaaacatatgacagaattccagtttgttaaaatgcatgttgaacgctgagaaaaaaaatattaagctagggggttttgcagggtaggtgggaatggagagttggtggaattgtcactgaattttctatgtcaaatatctgtaatgtttttcaatgaatatttattagttttttaataaattaacataggtatagagatgctttggaattgaataaatacaagctcatgatgccactttataagactaagttgacatgctaagaggcccttggatagtagccattagccagcaacaaaccatcaggtgtgaggaaagatgcgtcaaggtagagacaccagagtactatgtggatcattctggtgctccagcaccctcatgaggggtcaatgtacttgtggagttgaggaatggaaacttagaagtcttcatgttactatcacgtagacttctagacatctagtctgatctaggaaaagaagtgactgtattcagtgatgttactgtccttgtgattcttaagtcaccaggctatgtgctgggctctgggtatgcaatgagcttcatgaatttacagtgtagtgagaagacattaaagcagatacatatataagtgtattacaagttgtgataagtattatgagaaagagcacaggtttcaatgtgagagaataaaagacatcactttctgtaggaattagccctctaagaagaacatacacttttagttttcgctttgtttttttttttgtcatcaaatacagtcattattagttgaatcacaaaccctatcatagtagttagcattgtttgtgcttgtagataataaaagtctgttatcaaataggaagaaatacatgagaaataggtctttattcttgagggtacatttcccttttgatgaagcagtttcgtactttacatgatcctaaaaggatttttactttaaaaacaaagaaggagagattgatttgagttttgagccagcaggactttgaaatgtgattataattataggatacaaattgcagaattttagtgagaagtaatgttgtccaaagagaattgatagggaaggtggtgtcagtgaagcagaaaagatgccagtcctgttttcccaagttctactttctgatcctggcagggacagcagtggtggactgccctggggtaaaatccctgccctctgtagggtcagaattctttttctaaatgggaagagatagactttaagggtcctccctccatggatatctcctgatgctgtgaaatgtttttggtcgcagaatataatgtgaagttgcatatctgcactcttttagcagagtattaaacatgagaacaagatatttaatgggcaaatgttttgagcttagatacctaacagagcagataaaattcttcaggaagtattaataacaagaggaagaaattgctttagaggcttactctgtgtttctggctttcattgtagtgtgatattctggggatatgatttaattggtgaggtcagaaagcaagtgcaatgtgtgtgtgtgtaattgcacaagttgggatacatcactggtgaatcacattccctttgtccgctcaaaacctgataacgacagtgttgttcttgaccttctgacaccagaggtgtttctctgtgtagatagaggaagaggctgctgattttttttaaactactcctctgtcccagcactttgggaggccgaggcaggtgaatcacttgaggtcaggagctcgagaccatcctggtcaacatggtgaaaccccgtctctactaaaaatacaaaaattagctgagtgtggagtgcgtggctgtagtcccagctactcaggaggctgaggcacgggaattgcttgaacacaggagaaggaggttgcattgagccgagattgcaccgctgcactccagcctgggcgacacagtgagactccatctcaaaaaacaaaaaacaaaaacaaaacaaaactactactctgatatatgtacttacatattaaaacctttttcccttttaaatggttaaaatatttaagctaatgctaaatgacgagttaatgggtgcagcacaccaacatggcacatgtatacatatgtaacaaacctgcaaattgtgcacatgcaccctaaaacttaaagtataataataataaaaaataaaattaaattaaaaaaattaaaaaaattaaataaaatggtacaattaagttttgtactgatgttaatcttatagttttataggttagttttaattttatatttgtaatatattatatattttagctttgtatttgttatattgacaaatataccacaataacatataatgttaactttaggagaagttgggtgaagggtatatgggaactctattccctttacagcttttctgtaaatctagaattatttcaaattcaatctactaaaggaaaaatcgtattaaaatgtcttaattttaaggatgacatctaatatactctgaacagtaaacatctctgtcttgatgaacagtgtgagaataaagtgtaaaaaatgaattttggtggaatagagctccttcggtaccagtacttcttaataaaaatagtcgtccaattacctgctgcaataattttcttaaaatcaggatcagagacggatattcattgcagcattgtttacaagaataaaagatgttctaaaataagggattggctaaataaatgacacctcttcagtatcctggaatgctataaagcaataacaatgatgatgtccaatgtatttgacattaatagtgctttcgatatgtggaaaagtatgtcataaaggagtatataaatatatacctacgaagatggccgaataggaacagctctggtctacagctcccagcatgagcgatgcagaagacgggtgatttctgcatttccatctgaggtaccgggttcatcttactagggagtgccagacagtgggtgcaggacagtgggtgcagcgcaccgtgcgcgagccgaagcaggacgaggcattgtctcactcgggaagcgcaaggggtcagggagttccctttcctagtcaaagaaaggggtgacagacggcacctggaaaatcgggtcactcccaccctaatactgtgcttttccaacgggcttaaaaaacggcacaccaggagattatattcctcacctggctcggagggtcctacgcccacgaagtctcgctgatagctagcacagcagtctgagatcaaactgcaaggcggcagcgaggctgggggagggtcgcctgccattccccaggcttgattaggtaaacaaaacagccgggaagctcgaactgggtggagcccaccacagctcaaggaggcctgcctgcctctgtaggctccacctctgggggcagggcacagacaaacaaaaagacagcagtaacctctgcagacttaaatgtccctgtctgacagcttttaagagagtagtggttctcccagcacacagctggagatctgagaatggacagactgcctcctcaagtgggtccctgacccccgagcagcctaactgggaggcaccccccagtaggggcagacagacacatcacacggccgggaactcctctgagacaaaacttccagaggaagatcaggcagcagcatttgcggttcaccaaaatccgctgttctgcagccagcgctgctgataccctggcaaacagggtctggagtggacctctagcacacttcaacagacctgcagctgagggtcctgtctggtagaaggaaaactaacaaacagaaaggacatccacaccaaaaacccatctgtacgtcaccatcatcaaagaccaaaagtagataaaaccacaaagatggggaaaaaacagagcagaaaaactggaaactctaaaaagcagagtgcctctcctcctccaaaggaatgcagctcctcaccagcaacggaacaaagctggatggagaatgactttgacgagttgagagaagaaggcttcagacgatcaaactactccgagctacaggaggaaattcaaaccaatggcaaagaagttaaaaactttgaaaaaaaattagaggaatgtataactagaataaccaatgcagagaagtccttaaaggagctgatggagctgaaagccaaggctcgagaactacgtgaagaatgcagaagcctcaggagcggatgcgatcaactggaagaaagggtatcagcaatggaagatgaaatgaatgaaatgaagtgagaagggaagtttagagaaaaaagaataaaaagaaacgaacaaagcctccaagaaatatggaactatgtgaaaagaccaaatctacgtctgaatggtgtacctgatagtgatggggagaatggaaccaagttggaaaacactctgcaggatattatccaggagaacttcctcaatctagcaaggcaggccaatattcagattcaggaaatacagagaacgccacaaagatattcctcgagaagagcaactccaagacacataattgtcagattcaccaaagttgaaatgaaggaaaaaatgttaagggcagccagagagaaaggtcaggttacccacaaagggaagcgcatcagactaaccggatctctcggcagaaactctacaagccagaagagagtgggggccaatattcaacattcttaaagaaaagaattttcaacccagaatttcatatccagccaaactaagcttcgtaagtgaaggagaaataaaatactttacagacaagcaaatgctgagagattctgtcaccaccaggcctgccctaaaagagctcctgaaagaagcactaaacatggaaaggaacaaccagtaccagccactgcaaaaacatgccaaattgaaaagaccatcaaggctaggaagaaactgcatcaactaaagagcaaaatcaccagctaacatcataaggataggatcaaattcacacataacaatattaactttaaatgtaaatggactaaatgctccaattaaaagacacagactggcaaattggataaagagtcaagacccatcagtgtgctgtattcaggaaacccatctcacgtgcagagacacacataggctcaaaataaagggacggaggaagatataccaagcaaatggaaaacaaaaaaaggcaggggttgcaatcctagtctctgataaaagactttaaaccaacaaagatcaaaagagacaaagaaggccattacctaatggtaaagggatcaattcaacaagaagagctaactatcctaaatatatatgctcccaatacaggagcacccagattcataaagcaagtcctgagtgacctacaaagagacttagactcccacacaataataatgggagactttaacaccccactgtcaacattagacagatcaacgagacagaaagttaacaaggatacccaggaattgaactcagctctgcaccaagcagacctaatagacatctacagaactctccaccccaaatcaacagaatatacatttttttcagcaccacaccacacctattccaaaattgaccacatacttggaagtaaagctctcctcagcaaatgtaaaagaacagagattataacaaactatctctcagaccacagtgcaatgaaactagaactcaggattaagaatctcactaaaaaccgctcaactgcatggaaactgaacaacctgctcctgaatgactactgggtacagaacgaaatgaaggcagaaataaagatgttctttgaaaccaacgagaacaaaggcacaacataccagaatctctgggacgcattcagagcagtgtgtagagggaaatttatagcactaaatgcccacaagagaaagcaggaaagatccaaaattgacaccctaacatcacaaaagaactagaaaagcaagagcaaacacattcaaaagctagcagaaggcaagaaataactaaaatcagagcagaactgaaggaaatagagacccaaaaaacccttcaaaaaattaatgaatccaggagctggttttttgaaaggatcaacaaaattgatagaccgctagcaagactaataaagaagaaaagagagaagaatcaaacagatgcaataaaaaatgataagggggatatcaccaccgattccacagaaatacaaactaccatcagaaaatactacaaacacctctacgcaaataaactagaaaatctagaagaaatggataaattcctcgacacatacaccctcccaagactaaaccaggaagaagttgaatctctgaatagaccaataacaggatctgaaattgtggcaaaatcaatagcttacccaccaaaaagagtccaggaccagatggattcacagccgaattctaccagaagtacaaagaggagctggtaccattccttctgaaactattccaatcaatagaaaaagagggaatcctccctaactcattttatgaggccagcatcatcctgataccaaagccgggcagagacacaaccaaaaaagagaattttagaccaatatccttgatgaacattgatgcaaatatcctcaatcaaatactggcaaactgaatccagcagcacatcaaaaagcttatccaccatgatcaagtgggcttcatccctgggatgcaaggctggttcaatatacgcaaatcaataaatgtaatccagcatataaacagaaccaaagacaaaaaccacgtgattatctcaatagatgcagaaaaggcctttgacaaaattcaacaaccttcatgctaaaaactcaagaaattaggtattgatgggacgtatctcaaaataataagagctatctatgacaaacccacagccaatatcatactgaatgggcaaaaactggaagcattccctttgaaaactggcacaagacagggatgccctctctcaccactcctattcaacatagtgttggaagtcctggccaggagaaggaaataaaggatattcaattaggaaaagaggaagtcaaattgtccctgtttgcagacgacatgattgtatatctagaaagccccatcatctcagcccaaaatctccttcagctgataagcaacttcagcaaagtctcaggatacaaaatcaatgcacaaaaatcacaagcattcttatacaccaataacagacaaacagagagccaaatcatgagtgaactcccattcacaattgcttcaaagagaataaaatacctaggaatccaacttacaagggacatgaaggacctcttcaaggagaactacaaaccactgctcaatgaaataaatgaggatacaaagaaatggaagaacattccatgctcatgggtaggaagaatcaatatcgtgaaaatggccatactgcccaaggtaatttatagattcaatgccatccccatcaagctaccaatgactttcttcacagaattggaaaaaactactttaaagttcatatggaaccaaaaaagagcccgcatcaccaagtcaatcctacgccgaaagaacaaagctggaagcatcacgctacctgacttcaaactatacaacaaggctacagtaaccaaaacagcatggtagtggtaccaaaacagagatatagatcaatggaacagaacagagccctcagaaataatgccgcatatctacaaccatctgatctttgacaaacctgagaaaaacaagtaatggggaaaggattccctatttaataaatggtgctgggaaaactggctagccatatgtagaaagctgaaactggatcccttccttacaccttatacaaaaattaattcaagatggattaaagatttacatgttagacctaaaaccataaaaaccctagaagaaaacgtaggcattaccattcaggacataggcatgggcaaggacttcatgtctaaaacaccaaaagcaatggcaacaaaagccgaaattgacaaatgggatctaattaaactaaagagcttctgcacagcaaaagaaactaccatcagagtgaacaggcaacctacaaaatgggagaaaattttcgcaacctacttatctgacaaagggctaatatccagaatctacaatgaactcaaacaaatttacaagaaaaaaacaaacagccccatcagaaagtgggcgaaggatatgaacagacccttctgaaaagaagacatttatgcagccaaaaagcacatgaagaaatgctcatcatcactggccatcagagaaatacaaatcaaaaccacattgagataccatctcacaccggttagaatggcggtcattaaaaagtcaggaaacaacaggtgctggagaggatgtggaaaaataggaacacttttacactgtgtgtgggactgtaaactagttcaaccattgtggaagtcagtgtggcgattcctcagggatctagaactagaaataccatttgacccagccatcccattactgggtatatacccaaaggactataaatcatgctgctgtaaagacacatgcacacgtatgtttattgcggcactattcacaatagcaaagacttggaaccaacccaaatgtccaacaatgatagactggattaagaaaatgtggcacatatacaccatggaatactatgcagccataaaaaatgatgagttcatgtcctttgtagggacatggatgaaactggaaaccatcattctcagcaaactatcgcaaggataaaaaaccaaacaccgcatgttctcactcataggtggcaattgaacaatgagaacacacggacacaggaaggggaacattccacaccggggcctgttgtggggtagcggggggtgagggatagcattaggagatatacctaatgctaaatgacgagttaatgggtgcagcacaccaacatggcacatgtatacatatgtaacaaccctgcacgttgtgcacatgtaccctaaaacttaaagtataataaaataaaataaaaatatgtacctacatacacaggatggatggaaaacatcgtggcaggttgcataccaaaatacaaattgttgcttttaactagcctgtgggttatgagtgatccttatttatattttgcttatgtcagtttcctactttacctatcatgaacatatattacttgtttaataaagaaaataaaaattcgtgtctccaccatcaccacacaaatttaaaaagcagttgcaggaatgattaatatcctttttctcagataggcaattaaaatggcatgtccatatgtaaatattgtctaaattttgtccctttaaagtaacccttaaggctactttttcttgaaatgcatcatctttttacctgttcctttgattttcattcatattggtgaaagcgcaaatcacagttcatagaacctcttgtcatttttgctgttgatgtttggtggtaactgaattatctgagcctgtaatcttttttttaaaaaaggtaagtgttaattactatggactaggaaaaagtgtgcctctccccagcgaaacagaacagagcctggcgggagcagttggttttctgaaacttttattcataatatatgctatctttttgataagatttagtggtaggcttctgacattgcctagaacccaaactgtgatcgtggagcaggtgatgtctggtggacatagttactctaggaatgggagtgctgaacagattcgaagtgtagtctagggaaggaacatttacattgattcactcattcattcaactattgagtaaatttctgttacgtgctgaacactgtgctaaacattttgaaatgtaacacttacaatccagtaagggagatagcatgcagataattaatggtaagtaattattgaccaaaaaaataaagttgaaaaacaacattagtttgatggaaagcccagaaacaaaccctcacaaatctagtcagttgatttccagcaagtgtgccaagacctttcggtggtagaaagaaaaatcttttcaacaaatggtgtggggacaactgcatagccacaggcaaaagaatgaagttggacccctacctcataccatacacaaaaatgagtcaaaaaacctaaatgttagaccaaaggcccaaatttaagagctaaaactgtaaagctcttagaagaaaacatagatgtcaaatttcatgaccttggatttggcaatgaattcttagataatgacagcaaaagtatgaggaatgaaataaaaaataaatacattggacttcatagaaattaatttttttgtgctttcaagaacactatcaagaaagtgaaaggtaacctagagaaagggagaaaatatttagaaattatatctgataaaagacttgtttctagaatataccaaaaacccttacagctcaataataaaaagacaacacaatttaaaaatgaacaaaggttctgaataaacatatatcttcaaagaagatacacaaatggccaataagtacatgaaaaaaaatcctgaaataatttgcctcagtgagatataaattaaagccacagtcagataacaacacttcacatccactaggatgactataaccaaaaagtcagatactaagtgttggcaaggatgtggaggaatcagaaccctcatatgttgttggtgtgaatgtaaaatggtatagctgctgtgggaaacagttcagtagttctacaaaaagttaaatatagagttaccatctgacccagcaatttcattcctaggtatacactgcaaaagaacagaaagaagagactgaaatagagactggcacaacaatgttcttagcaggattatccacaatagccaaaggtggaaacagcccgaatgtgcatcaacagatgagtgaattaataaaatgtgatatatgcatacaatggaattttcaaccataaaaaggaatgaatttttcatacatgctacaacatggataagccttgaaaacataatgcaaagtgaaataaatcagacacaaaaggacaaacattgtgtgattctacttatacgaagtacctggaataggcgaattcctagagacagaaagtagaatagaggttaccaggaactgagtggaggggagaatggggtattatttttttattttcttttttatttcagtaggtttttggggaacaggtggtgtttggttacatgaataagttctttagtggtaatttctgagaatttggtgcacccatcacctgagcagtatacacggtacccgatgtgtagtcttttatccctcacccaccttacaacctttccccagagtccccatagtccattatatcattcttatgcctttatgtcctcatagcttagctcccatttatgagtgagaacataatgatgtttggttttctattcctgagttacttctcttagaataatgatctccagttccatccaggttactgtgaatgccattacttcattccttttcatgactgagtaatattctattatatatatatatatcaatatatcacatccatgcagtggaatactattcagtaataaaaaggaacaagctagaggcatacacaacacccacagatgaatcgcgaatgcatcatactgagtgaaagaagctagaatcaaagggccacatttatttttatttatatgacattctggaagaggcagatctgttaggacagagaatagatctgtggttgccagaggtttgggttggggagtgattgattgcaaaggggctccttgagggaattttctggagtgatgaaacggttctgcatcttgattgtggtggtggttacacaactctgcatttatcaaaacaaataaaattgcacacccaaaagagtgcatgcctgaaacatttaaatgcatgcttgggggtagtggaaggcccccagaaaggagggggagaaggagaaatttttattttaagaattagatgttttgaaaacttgtttacattacgttaaagctgatcccataatttggaagcagtatgaaatggcagaataaagaagctgggattttgtactttctagcaagggaaaccctgatattcgccagtgctttgggaattgatgagtaagaaagactaagtaacagcctgtcccacagtgatcatctctgccaccctgtgttgtcattttagatactgtctttttaggggcccatttgcacttggtcttgcccaaggatcaaggaaagtatttctgccactttccaaagaagccttgcataacaaatgggtatgcgacaaagtttttcgagggaacaggttcagtttaggccccctggtgacaagaagacgtctgtgctgtcctcatgagctatcctcctgcccaccagccctctgcttgtcctctcctttgagtggttgctcattcttccctttcacttgctgctggagccactgtgggaggaaaaagagtagacaaggaaaaatgccaggagaaaccttgcctttgtgcatgaagctggtggtgtggggagtgtgtggacttgttccccacgctttgcatgaagtctgtgttcaaatctaaaaacaacacacatgtgagtttccaggccttggtcattttatcgattttctgtcaccctaactttctctccctcacatcaccttgacgggcatttccagtgcagggtggtgctagtttagggaaaaaaaataaagagatagagctggagattgcctggactgcagaggaaggcagcagacctgctgtggagtgtggtgatcattggctcttgccactgctggtggccttagtggcttctcttgctttagagaagtcaggggtttgaaatgtagggagagactgtatgtggctttttctcctagtttgagtgaagctacaccagatcattgccttgcttccacttttttttttcatgtttgtctacctattcattctcatccacctattcactcagcaagtcttttgaagaaataaatccattttgtgccagtcaaaggctgtatggatgatgaagaaggagacacagaatgagacacatcttcagtggagacacatagagaagaggtgattagaaaaccctggaggtgtagcgagagctatgccgagaagagttgggggtgccaaaggtgcatggaggtggtgaggtgtgctttttgaggctggggattcaagagggtagacatgacttgtaggagacaggtaggagatgagggagtgtggagtatggagagctttccagataccatgaactgtgtggggcctctgtaaaccaaaggtatctgaaacaggtctcagtgaatttagaaagtttattttgccaaggttaaggacgtgcccatgacacagcctcagaaggtcctgaagacgtgcccaaggtagtcggggcacagcttggttttatacattttagggagacatgagagatccatcaaatatatgtaggatgtaccttggttcagtctggaaagacgggacaactcaaagtgaggaggaggcttccgggtcataggtagatgagagacaaacggttgcattcttttgaatttctgattagcctttcactgaatgcacaatttacaggaatagtcacttatgccttagttagtctagcttagtgaaatagtaaggccgaggaagcaatcagatatccatttgcctcatgtgagcagagggatgactttgagttgtgcctgtcccttgtccacaaagaatttccttgtgataaaattgtgagggatccgtagctttctataaatttttgtagttatcttacttaggaatagaatgggaggcaggtttgcccaatgcagctcgcagcttaacttttccctttggcttagtgattttggggtcctaagatttattttcctttcatacctcccttcccaagttcaaggaatgactgggctttgacaaaagggtagggagcccagggtgcctggagcatgaggggaggttggcagggttcagttggaggacgtcccttgggctgtgtccgcctttgcccagccttggaaggggatgaactttagggtgcacgtcccagtggctttatggagggaggactggacatggcaaggccgggatgacatttggaagacgcctgggcactggggtaagagatggatgtgaattgaacttggcagtcagaatggttagaggtcagtagattccagtgaagtccagtgggagaaccaaccagaccttttccagaggatgtcttttgctttcttcctctcccttctcctccttttctctctcccagccaccctgatgtgttggttatgtaggaaagtacagctggacttgttgctttctcatttctcacccttggcttccatcacatagacccaggtctgttggagaaggaaacttactaacctaagatgaatgagtttggccacaaggagttctgcatttcccaggataacatttgtctttattttaaatcatcaaaacagcatttaagtgagaacagggatccgtgctcgcttttattcactgtgttttccaattgctcacattatcctctaataacgggatgtgtacacgatatgatatagaggccactgggctgcagagtagtcattagctttccctcaaaaataaaaagagaggctgccgtttgaataatgatccctggctgttttctttgtacacgggccatttccttaattaggtttcaagcttcatctctcttgtttttagctaaaaagccaactgagagaaggagacaaattgtgttgtggggaaaaaggagagaaatgtgttccatgcgaagtaaggggcaaatgaataaaacgggagattagtggacaccctgatgttcaagctgagtttggcagagctgggcttgtgtctgggatgaactcagcgtctttggaggtcaggggtacctttctgcatacctcagggaatacctcctccacttcctacctagcgcttttgatccaggtctcagaatttgtctctagggtcacctttcccttcactttaccttgaaatgaccttggcagtgtatcttttaaacatgcactgttaggagtcagacagcctggatttaaatctttcccttctacaagccagctctgtgaccttgggcaaagcctgccattccctgtagccccaggttgtgctttggtaaaatggaactgataatagtagctacttcacagggttgttgtaggactaaactactaaactactttgtttttacgtgaagggcttgggacagttcatgggtcagggtgaatgctcacttaagcctagggctgctgcagctgctgtggctattatccttattattattattagcccctgaaggagagtcctggtggggggtgtaggacagatgcaggattgttacttcataacccaactctcagttaggaaaagcgagtcggcatgcaggggccataaattacagagaacattgacaacctcgtttatattttcccagaatgctatgttttctcacctgtttttaacttctgagctccctgagatcctggagatggttcctgttttgagtttgctgaatatggtggcaagtaactttgaatttggactgagaccttggttcataacctgttccatcttctcaaatcagggtgctttgtgttttaatgttggttcccctctccccgccaccaaaaaaaaaaaaaaaaagagtgaagaaatggtaacaccactaagaagctttcctgacctccctaggcaggaattcttcctcactctctcagtgagtctccccttacccccatttctagctgcctggtgcatgggggctatggagatgaaacccacaatctttccttttaaactcaaattgtggtccatggaccactagcattagtatcacacagaagttgttagaaatgccaaatccccaacaccaccccagatctggatcagaatccaaattttaacaaagcacctcgggagattcatatgcatattaaaacatgccaaactctaggatatctcactcccattgggaagatgaatgagcgtaagccaaagagtatataccagtgtggtagaccaaagtgtcgccccagggaatgtagggacttcttacaggcagtggcccttgatctgggtattgatggatgagtgggagttggctaggaagaggggagagtgagggcaaatagaaagacggacctctacacgaaagaattggaggtacaaagccagtggtggcaaaataatgtgacctgcttttacttttctcaacttggtatttatggcttccaggatcctttctagcactcacacagggcatgtgccgggttacgagaaataattttgaacaatgcagcagtgttttgtttctaaaattcttacatgtgaacttcaggttcataaaaccgacagacgagagttattagtactttgcagtgagtttactcaactttcagattaattccttaggattaagaaggaaggagtaggccgggcgcagtggctcatgcctgtaatcccagcattttgggaggccgaagtgggtggatcacttgagcctagaagttcaagagcaacctgggtaacatggcaaaaccttgtctctataaaaaagtacaacaattagccaggtgcggtggtgcatacctgtagtcccagctatagctactcaggaggctgaggtggggggaattacccaagcctgggaagattgaggctgcagtgagccgtgatcatgccactgcactctggcctagaaggaaagtggaggccaggtggctccagaaggcagtggctcaaacctgctactcaggagattagttgggaggattgcttgaatccaggatgtcgaggctgcagtgagctgattacaccactgcactccagcctgagcaacagagcaagactctgtttcttaaaaaaaaaaaaaaaaaaaaaaaaaaaaagaagaagaaagaggaaagagtatggatgggctttgaaatcttccatttgggtctggatccacagtctgccatttgcaagaagaaatgtgggccagttcgtagcctctgcagtctgtaagttttaatttgtgagatgtaccttttgatacctcactggcttgttgtgagaacttggttggtttgtagtgggagtcatgaaattcatgcgtctttaccttcagatgtgtggttccattattaaaaaaaaaaaaccagtgctttatagcctaactgaaacatagcagaggcagggaggagggtacagggccccacaccacactcctggtccaggactgtgtaccgtggcactgcagctcctcagagagtcccagtcccgctccgctagcctagccactctctcttctgttggcaaggggagtgtttgcgcaagtctgggtgcttcctcagctgaaacattttcaaagttaattttcactttcggtgtttggctgatgttccagtcttttcctttttctctggttaaccttttgtagcccatcacttgtgttttatgaaagatgaatggattaaaggaagcgtaatggtaacaaggaaatggaatagctagaaaagcattcaattaacgagagagcccacggaacacaaaatgaatgcaagaaaagacagataaattcagggctcctttattaactagaattcaccttgaattcagaaaagggaactttttcagtaaaggattagtgacaagatttgaaaagcgtcccccggggaaaaggattaacaaaaggagacattatagaatgaaatagaagtgaattaacacatcgattttctgtaagggttaggagacacaagatttatttggaagataaatatttggtaattgaaacctgtaagcgttttgttgctggtttttacccagtgaatctgtgcctgtgtagtgaaaaccttatggctgatgaacgtgggatggtgtagaccccctaacaatgctgtccgacctccttctctctcagcatttgctgctcggatgtatttttccgcttctttagtaattcaaaggattttctctccgatcaaagaggttagtttaaaagttaaatgagaatatgggaccagaagataaaatcattatttttaaacaggggaagttctttcttttaataaggacttctattagatatttgtttaactttttagcttcctgtgcttcaattgagttccatgaaagcatttttgttgtctacagaggagtgttttgggacttgtcttgttggttgacagcagcagtttacctgatgggggtttcataggatgtgatgccctgtcaccaggtgatggacttgatgtaggaagtgccaccagcagtctctgccacgtggcatattctcccaaatggcccttgccattccagaggatgttgggttgcattgtctgactcattaatttacaaaggattatttattttctaatgctctatagcttcttcgccttcaggatgtgggctgtgctgctgaacggagaggggtagagcttgtaagcccgtgacttaattctaatccggtccattgttcatcttcattcatgccttttctccctgtttccttctgttaatatgggaaattgatatctgattatatatttggcttttgactatgctgctttctgagtataagtatgaccaataatgtcattgtcaccaattctgattttggatgatcaattgggtcagtggggtctttttaaagtaacttaaccatgctgggtgtggtggctaacatctgtaatccaagcactttggaagactgaggtaggaggatcacttgaggccacacgttcaagaccagcctgggcaacaaagcgagactccatttctaccaaaaatttgttttaaaaaattagctgggcatggtggtgtgcacccatagtcccagctactcaggaggttgagaccagatgatcatttgagcccaggagtttgaggttgcagtgagctgttattgtaccactacactctagccttagtggcagagtgagaactgtgtccctttaaaaaaaaaaaaagaaaaaataaaggataagttaagcctgggcgacatagtgagatcttgtctctatcaaaagaacaaataaattagccaggcttggtggtgcagatgtgtagtcccagctactgaggaggctgaggcaggaggcccacttgagcccaggagtttgatgttacagtgagttatgactgagccactgcacttcagcttgggcaacagagcgagatcctgtctcaaaacaaacaaacaacaacaacaacaaacaaacaaacaaaagacagaaaaaaaaaaaagaggccggggatggcggctcacacctgtagtcccagcactttgggaggccaaggcaggcggatcacttgagctgaggagtttgagatggcaatgacctatgatcatgacactgaactccaacctgggtgacaaaatgagaccctgtctcaaaaaaaataagtacaataaattacaattatttacattcagagataggaaaaagaaaaaggaaacatatttaatacacacctatataataattttagtaggaaatcatttaatattatgaaagttgcaattactagttggagtttccaaagaaaatgtagttatcctacctattgaaatagtccatgatttcccgtactggttccacttttccttgttcccagattttatcctaccccatgaaacacagcaggcacatgtgcacacatgggcgcacacacacacataacaaacacttgtcccagatttctctgggagggaggaggaagagagtagatgattcccttgaaactatgttgattttagatttaccgatgtttggaaaagtgacacctatgactcaggcagatacatgtctcccacctgaccattgtttaagataccttatgtagatctgatgtacattatagaatatataattcaagagagggaaaataaagtacttctctgaaattgaactacaaaagcctgtcaaacaattatacaggaaactttaaacagttcttgcctcacgttgttacttttctgattcctgatctagcatctgtaagttagcattggtgtgtaacagcaccaagctgagatgtgctgaaaaccctgagtattgcattcaattttataccaaagctaggtcctttagcgacacattctcctctcactggtaaaatctttcagtcaaggcttcttgccttacaatttctccaccggaataattccagcatctctcaggtacagtaaaatggatgtgtggcctctaggattgttaagtctctgtgtggctgctaaggattgaagatgtggaagtggttggtgtagctcaggggtctgtatttaaaataccctttgtttgtggaggggacttaccatcttaccattcaggtatttggaaggtggtgtttttcaggtgaatgagttacagtagagcttccagggaaaaattcggcaaggtcccaagtataagatggaaagagcgcttggtggatcctcttctaattcttgatctcgagtttggtcttccaggctgtttgctgaaagcatcactgcagctgagcgtgcactctttctccacatactctcacctcctcattgcctgtgaataattttaaacactgaaaatgagactgcctttcccaaagtctgatgaggaaaccatgcccatgtcccagtgagcttcaagatgggttgacatttactgcttatccctgtgacctcaccctctcctgtctgtccactcctccttcatctgtttctctcttcttcctcctccatccggttgtacacggaggcatctgcttggggctttggtcccgggacctgtgatctctcctccctgctctcatctcctctttctgcctcttgccctctgttattgagggtgatcttattcatcttcatgctgcttttactccaggatcctccgagtgtaaggtgtgggcacatgacattttccatgcctgggagtctcttgtctctggtctttccctctcctgtgacctcatcctttccgttgtggtaacagcagatcctcagagaggcctttgctctccatctaacttcatttttgttagactcacaggacttgatgctatttgtcatggtgtataatgacatgtgtgttctgtgcttttatttggttgacatctccccagtagattctaagctctgggtggatggagagcacattgcttttcttctctggagtagtcctaccactcagcatagtatctggcacatagtaggtatttaggaattatttattgagtaagacatcagtggttgacttgattctatagtcttttctgacagtgtcagggcattgttgaaagcgaaaattttcttctaattgtatttaatttcctgatggaaattgttttgttggtttgtttactaagaagaaattaattcagcagagtttcttgtttgactggacgagtgcatatatcaagtctctcactggagccattttcaaaagcctattttttccagcagagtatgtttgcacatatgcactgtgctatgaaatgtatgactggagtctgtgagtttggtggcctttctgaagtttcaaagcatgatacctcacccagggtgttaactctgcaagcctcagttttctcatctctcaggagttgtgcctgtctcaggagccgttgtgagaaggctatgatgcgtgaaaacacttaggggagacatggctcacgggacatgcccagctgttattagctgctatcttgatcgattagaagatggatttggtgtgcatctgctgtcagcctcatcagtgactttttttctgttttttttttttttttttttctattgcttagtgctgctcagcgggagggattgccttgtggggctgcaagaacctctccatggaagagtccaggggccactctttgagatgcctgggacagaatttcagctactggagggacactgggtttgagtcatcagggtttgtgttatatgcattcagtataaaatgattctctaacccagtttttctcaacctctggactcttgacatgtttggtcagataatcctttgtggcggggcctgctctgtactttgcaggatgtttagcagcatctctgacctctgtccactggattcagtagcaactccctttcttcccccgagttgtgaaagccaagattgtctgcagacactgccaagagtccctgcaggacagaatggtccctggttgaggcctgttgcttcaaatgagcctcccctcttcctggagaagcctattgttttattgtcttcactacacccaccccatgggtctcagtgtgtttgtatgagggcccctgggttgtcagagccttgcaagtccctgtttgtattttggtgagctgaaggatgagctattttgttcttaagcttcctagggaaataaattgaaaatagatccctttggcatgtataggatgacctcactttgattgtaaaaaaacaattacatttataatcttacatttaaaaaaagatctgtaaagatataaattgaggagtaaactgtgatatttgggagaatgaggattaacatttttcccccttctatttgattacatctaccatctgattgttttccttacagtgagtacattttgctttaataagaagaaaaaagtctcgttttaccttccaatgtcttaggagagttattagggaggtcaggacatgggctatcgaatgagcctgcctggatttgaatcacatccttacttttctatttttctccattttaggttttatgtttcctaatttaaaagctatgtcacaaagcaaatttagaaaactggaaaaagtcatccaaaattctgccaccatacccaggcacgattggaattttgttgtggttcctccgagcatcttttgctctttttttttttaaacatggctttaattataaacacaacacacttgtataatttgcatctgtatttagcattatttcatgagcagatttctgtgacagtacacagttgcatagacattgattaaaatatttattttggcatagtaacgtagcagctgtggacaaaggccaggcttgtttgatgggttgtttaattcatgtcttgaacataaacgtgagtcagttacactcctctttgcacattatgagacaagacagttattatatttttataacagtgattactaaatttctttgaacttgacactttatgtatttttaatcacacaaataatacatgaacctatgttctttgtgaagaattttaataacctagtggtacatagggaaaaaattatagttcccattaattctaccctgtgaccccggcctgaaataaaattgcttccagtttagtgtttacctttcctcagtccatttgagaaatcatcatttattggcagaacagccagagaaactcatgcactataatttatacttagagaacagaactgtctagtggcattgtttcaggaaatgtccaaaattttatgtatatgtttaaagtacagaaaccttaaatcacatgatgaatgtacgctaatgatcagacagtacacaggatgacttagtgacatagaccagcatttgcccataggcattgcctgtcctgacactgtgtaggaagcagtggcagatcaccattcacacactgaaggactttttccaggacttcttggaagtgcacagaggtgctgaacctgtatctacagtcttgggagaattcaggagactataaatatagatgagaaaaaaatgacatcttttactttcactaacctctaaccaaaacatatgactttcttaacttacaaatgtagatgacaagccacagcagtgcctgtgactttgtcatcaacagaaatcacagatcgtttcctgtgatgtcatggttgatgtggatatctccttgctgttgctcatcctggacactgacgataatgactctagactcaccactagatctcattgtttaatgcacccatgaagaaacacctgtgtttctgcttcacaaatttatgttttaaacagttttgaaaactgagttttaatataatcagtttctttcctctgtgtcttctttttttgcattgaaaaaagtcattctgaggaggggtccatgggcttcattggataccagagtacctgtggtctgctgcaccccccaacccgaagctccaaaaatccccattaaaggcacattacagcataataatcaggaagatgtggatgaattgatcaatttccttatattttcctaaacagatgttaggagaaaaaaatattggtagcattgtcattttatgtgtgtgtatatgagagagagagagagaagtattagttacatttcttagtattctaggattcttcagaccaccatagaaatgtccttatcttgagaataatgtgtggacttctattaacttcctcaactccaggtttctatttccatgactaccaacctaaaatgtgtgaggaatcaagtgcttttggtcacacttggggtctgtagggaaaagcagctttgagttctgagcccttgcatggccaaggaactgtgagtggtgagaaggaccatggctctgcttcagctggctgggatcttggtgagccaggtgggcatctgtcccttattggccctggctggccgctgccctctcagggcctcaggctcatcctcacacctcacgagggagatcgtggcagtgcctgattggaggctgagtgtgtggtgcctggaagcagcctggttgctgcccagcacatcagtggtttctgggagatgccaggctatgttactgtgtgtgttaatttcctcaagagaaggaagatatttagagacattttgtactaagccccagcatgttcaaagaactggactcagtgggagatttcatataaaaacacagatttctggcttctcatcacaaacagaagatcgggtagctgccgcatgccccccgccctgccgacacaaagatcaaagaaaccaagaagtggctgacttcttaggatgggatggaagctctgccgtctgatgccgactccagactggctcatttctctcacctgatatgacctgtctggcttctggaggcatttgagttagtggtgtctgaaatggattatttctgggttcttttgtatttgaacaccctgattttaaagatgttgggagaaagtgctggtgctgggcttggtgaaatatgtcagaaaaatcatttgattctgaagttggtgacactgaaatttttagagggtaaagatgatgtcttcgcatctcagcgtagggatggctctgatgtataagaataccctcatttttagtactgtttatggtgatgcaaattggaaggtcacctgctgcaatctcctggaggacccgtgggctgctgtgggaaaatgggaggcaatgagatgtttccataaaggatgctgatgctgtgggtcatttttcttagcctctgatattggcagtagggaattatatgtcagcgtctccccaccttttcacagaggaagcttcccaacatgggaaggaagactcagccattgcctcttccccaatgaaaagctagggtccagctgtgccataaaccagcgtctctttactcaatttggaggtgaaagagttaaagaatcattcagatgcaggttcctaactctcattctggcttttggccctgtaactacagaaaccacttgagcagctgcaaatagtattagctttaagcttgttagggatcttgcagactcattcattgatggccttcgatttccaggacatcttggatatagaatttaaaagactttagttaagccaattaacttttgtggcgcctgggcaactaatatcgtgtgctagagaaggtcattgatgttattcaaatagcagttttatttgagctgggattaaggaagtcagacaaaaggtctaagaattgtttataatgtattcctttctgtgttgcagtatcttggcctttaacatctgattctgaccataattacacatacaagtgcttggttatgttattctttctgtagattgtggcttgattgcaccagctctcaactatccatcttgcagattgttcccagccaagttttaatctgaggtttcatctggttgtggtttatcaagcttttaaaccaaggtgtggtggttaagagcatggactctgaggctgtgctgcctgtgttcaaatcctggctcccctggtgatttaagctgcttcttccatagtgttgacttggagcctggggatagtcctcagccatgggttccattcctcaggctgtccttcatctgattggactatgtgtctaattactgccagtggaccatgagcagaactgataagggccacgtccaggctaaggagttcaagaagcaggtacactttctccactccctctcccccaatcggctggctgaatgtggaagactccaaggcctgagaggagaacagagctgttggattgggaggatcctgggtccctgagtcactatgtggaaggctacctgatgaaaagaacttcttcatggatggttacatgagcaagaaataaacctttattgtgtgaagccgctgagatatgggggttattcttattataatggctagtatccccttaactaataaactccttggtagcagtgtaactttggataagttgcttgatctctctataccttagttacctaacctataaaatgggggaaatagtatctccctgacccaaatagaatgctcagtaaatgctggctgctattattaataatacattattgttattgtggtcattccttttgattttctgggagcaggaaaggtgaattatcttcaactggaacatcagaaaaatgtgtttgaaaaaaagtaggctgcagaaagcaatctatatgaagtagtgcaggctttgtacaataacattttattatttgcatttgggctgtagttaaatttgttggtgtgcataaagacacttgtaaatgcatacaaagagatatttcttctctagcacacatggacttgtaattattgttttggctgtggggttgtgaggatgtatgtatagcgtaaatattctcatttcagagcctcagatgcccatgcaggaatctagcgaatactcaggaattggagtttttaaaataagcattgagactgttggattttgtttagtagacagattaattccccaggtttaaagcattatgtgatgcccccatacaagggcacggatggttgtatcaatagctggtatagtagcttgcttctgacttaatttcctttatctaaaacaggaatgtaatgcagtattcacatgcagttttataccatagagctacaatttatcagaggcatttgtccagttgactctgttgaacaggaaaagcttatgcaatctatgaagattttttttaagagtatagacagtaaaacaggagaggagagatagccatcttttaattcagaacctgacaatctggaagtggtggaaatctgtcagagaccacccatggcagagccagctgctctcggggacagcctccctggatctctggaatttagtcaggcactctaaaacagctagttgggagcatgggctctgggggcactgggcctgggacccctgatcattctgacagtgctctcctgaggggggtgtcagaaggcaccatggaaagtcatttagaccacaccgttcctcccgtctagctggaagttcttaaaagcacgctgaggaaactctgttgctttcgatattggttcatttccatgcttctcaaccccctaaggaggcgctgcttacaggtcatgctctgaatccctcaagccggatccatttgccacattgagccctgaagaagtaggggctgagccactccctgcatcctctctgcttcctctctgcttgcagttcagtgccatgtcctcttctctctcttcatcatttctaaaacagtcttttgttcagattcaaatagtctcttgttcctgtggctttgacagaaaaattgcattcctcaaggattgtcctcaaacttcactagatctggaagagcacagcattaacaatggacatttttgaccttggagacactagattggaatacctgtgtgaaacagaattattcatacaatagggcactttccatttcaactagaaaagtattcttttgtggctgagagttccatgaagtcagttttgtttttgtgatggttaagaagaagtggtcctaacttcagtttaaaggatttggatgtgtatttacttgaaaacgtaattgctttggagtattgtgttttgaagtgacacctttgtatgcaataattgggttaagaggaatactaagcacatttatgtcataataagaaaacgacgctgtctgtaaggagagactgcagaattatacattagtttttattgcaacatctttagtaacatatctaaaaattgtcttccctctgcccccccaatacacacacacaaatatggacttctagcaaccaatttctgccagaacagagtcctcaccaaataattattattgaagagtccttggagccttgtgaatgtattagaaaaatgccattgcccagagcaacatcgggagctagttggtctgttaggttgtaaatgttggttgcacgtttcttcttattgttgcggcaaaagaatgacgtatttcagaaattttagaaatactgagatttattacttctcccatcaccattatcatttgtgagtattttactctgtgttcagcactctgctgctgcgtactttacacacttcacatcatttgatcatctcaagagcagtatgaggtctggtctcatccaccttactgtcaaggaaaggaccctggtggaggctgatcaacttgttacgtggctagtacatggtaacatgaggacttgaacgtggaacatctggctagagagtccctggtcctcggcaccatgacaaacttgaagctggtgttaggaccgcttgcccctagcaagtgcaccttggtgattctactgcgatttgaaccctggccagtaattctaagccaagcgggatgctgctatcaggcttcgagtcagcagcacagcagcaatattgacacagattctttccactgggcccatcgtggtcagctatcttcactaggagtaagctgagggagacagagtaggaactacatcactctatccccactggagggacataggatgagcttacagcttacatgcaacctgaagagactgtcccctgtttctcttctcccctccgcatctctccttgctgcccctttctatcacaccttggtcacagatgtcctgcctcataatgactcatgaccgtctcattacattactaggctccttcatagactacatcttccaggaagcagggaatcatatatgctgcataggcatccccttttctgggaactttgactaatccatcattttacatcccgtgatcctctttctccctggtgactgtgatggccggtcctttctgtccctggccagagcacccttgcacatctggcaggagtaacatacctctactgcagaccagtgtgccctccagaggaggcacacagaccagccgtgcaggatacgagggtgcaagtttacatagaaatgatccatgcagctctgtgtcaacttatttttaaataaaatgaaccaaaaataagcctccttttaccccaagggaaccacatgtgtttgtcaacacattccccccatctccgtgcagcttggcacatggtaaaccatttgtaaatatttgttgaatgaaagaaaatagccacattttcagtttaagtttcttttttgtattggcatagtcccatcttaaatgattgggttaatgaatttatctcttgcactgtggctgtttcagagcttgaaggaataaaaagagaaaaagcaaaagaaaaaaaagaaccttagggtgggaacgtgaggcttctttcactcttacataaacaaagcaacttaaaggccttggactatctctgggttactatcccagtgtcagggttattgggggatctgaattagaggattttaagggaagtgccagagggttgggagagggatagagaagcagcccatttatttcaggtcgcagacttcaaggcaaacgctccacattttcacttggggatgggcaggtccttgctgtgccatctccccgccagggccttctgttaatcctcatgcagtgatttaattatgtcgactctagaggtgtaatttcagtttttgatgagaaaatctagccaagagaccatgttaacatgcacccactctttggctaatgatgcttcctgcatttgtcctctgcagagggtattttttttcctggtgccaagtccactcagagcccctcttccgtgtctggcttttatccgaattaattctgattggccagaagtctcctgactggagctccctctctgggggctgttctaggcgactcacttttagatacacaattctcacataggaaaaaaaccaacccaaacgtatgaacaacattaagtgttctgacagtgaagtagtacttttctcttcgtggtgtttgtgtgaaatgatctggcaaaatagatgctgcagaaataatgcatttctgtgtcttccttcccaaatgataaatgttcttggctcaccacaggatttcttgccaaatgctgattctgctaacagaagggatggaaacttcagaggctcttttgtgacagagagaatacaaagtttctcaggcttgcctttcttccatgtcacaaatgtgacacagaatgcgttctgcctagaccccagtcctggctaaatccacaggctgccttgctggggcatctctgcttactgcaccaagccggggttaggcccagtgaagacatcagcatcatccaccaccctgtcggaatttgtctgttacatcgagaccttcagtttaggaatatgaaaacacaatgcttgctagaatcccctgtagccagaaatgccaagagggaaaaataaggtagcactaggatttggggtggttcattatgtgcaggcactgtgctgagggctttgacagatgtcctcccagtaagactgcagggcagccctggatgatggacatcatcatctcttgagttctgaatgaggaccctgaggctcaggaggttaatggcttccttaaagtgacccagccagctggcccaaagtgttgctgtgtctggcccctagaacccttgatgtctctccaggagccctgcctctcattcctctgcctcttatggcccttccccattgccatctttcgagtcctggccactgcagcctctgacttccttgtctccatccagttttgcccccttactctattctgcacactgaggttattcaaaagtacagacctgatcactgatccctcctaccctcaacacccctggtggctccagttgttgcctgtccccgcagccccacccacctccccacatcaggatggggtccaaactcttactcctagcacaccgcccttgatgacctggcctctgctcacttcactggcctcatctctcaccaaagtcatccaaccgtggccatccatgctccagtgcagtgggggcagtgagcacttccttgagccccgggagtctcccctctggacttccctccttgctgctctctcttcctggcatctttatcccctgttgcccctcccaccccacccccagccttgtcgtcctcaaagggttctgcaagataggagtcactgccctgactaccctcatcagactttccctgatgctgcatcttccttgcctgtttccttctcagaatatcctggcaaagaaagcaagctttctttaaatttttttttttttaattttcacatgtttttggggaacaggtagtgtttggttacatgagtgtgttctttagtggtgatttgtgagattttggtgcacccatcacccaagcagtatacactgaacccaatttgtagtcttttatccctcgcctgcttcccacccttactccctttctccctgagtcccaaaagtccattgtgtcattcttatacctttgcatcctcatagttaggtaccacttataagtgagaacatatgatgtttggttttctattcctaagttactgcacttagaaaaatggtctccaattccctccaggttgatgtgaatgtcattaatttattccctatttatggctgaataatattccatcatatatctataccatagtttctttatccactcattgattgatgggtatttgggttggttccacaattttccgatagcgaattgtgccactataagcatgtgtgtgcaagtatctttttcatataatgacttcttttcctctgggtagatacccagtagtgggattgctggatcaaatggtagttccacttttagtttcttagggaattgccatactgttttctatagtggttgtactagtttacattcccaccagtagtgtagaagtgttccctttttaccacatccacaccaacatatattattttttgatttttttgattatggccattcttgcaggagtaaggtggtttcgcattgtggttttgatttgcatttttctgatcattagtgatgttgagcattttttcatatgtttcttggctatgtgtatatcttcttttgagaatttagacagcaagctttcttaaacatcactttactcgttatcatgtgcttggtgtctagcaccctgcctggcataccagagacaccaagtatagtttgcagaacaaacaaatggagtgctggagacaggatgcaaagccagcctggctcaaacctttcacctggtgccatagtcatcgcttccatttttgttttcctctctgccttccttttgtgtttagagggacctggtaatactttcttaactccttttcccagttgaaggatgactgcttttacgtgaaacaaaagtaatttgtactggcatccttgaagctatagaaaataaaaaggcccattgcctgcacagctgtgtggagaggcaaaccctaggaggagaaggaagaattttaggtatttttcctccaggtctttcttggtactttagggaacagaagccagttggtagcctgcatgtggccatggagtaatttctaattgaggttccagggccccctccagaatgggcttgctttgccctctccaggtatttttgttgttgacagctgtgtctactccctgggggaaggctccaagctcaccccgcagaggccctgtggaggaacaatcaactctcgtgacttcacatgtgacctgatggcttggaacagtcgtgtaaactgccgcagcccctgttaactgccaatgtctcctggttttggtatttgcctctcttgccaagttcaagccactgttggctacaaaatcaacaaaacaagtgtttttatggtagtaaaatgggtcctctgaaacaagtttgcaaatttttagaccctcagtcacctacccctctactccccttccccacaaggtcaaaagatggagcatctagaagaaagaccctgctaggtttgaaaccctccaacgaattgaccttcaatgctggttgaccttctgtgtgcctcagctctccacctgcaacatgggggtttgtgaggattagacaaattaataggtgaaaagcttctggcaccatcctgggcctgtgatacacgtgaaaagcttctggcaccatcctgggcctgtgatacacacaggactcattttactgacttccttagactctggtaatgaagacatgtcgcttaactacaaagagtctaattgggaccacattcccttaaaggaatctgtttattaggtgctcatattctgttgtaaatataactacaacttatatatatttttgaatgtgaaatagtcattgaaaaattagaaaataaaggtaagcaaaagaagaaagaaaaaaaatcatttgtgattgtacagctggctgtgaatgtacaatcacattgtgtacattgtgtatgtcctcctagcagggtgtgtgtgtgtgtgtgtgcacgtgtgtgtgagattagtgatttaaaacaaaaagtaagcagttactgtcatacgttgtgacactatttcctgtattctttgacacagtttgggatggctatgtgaaattcttttgtactggaatagctcactctatccagttactggaggtcaaattgcttggttttctactgtaggtaccttttcagtaattttgatgtatgtcaacattttaagttactaagggcttttgattgattaatgactatcactgggtctttgttcttcagaatcttttctttccagcaaagtgaaacatttcctggaaagagtaaggcattatatttttctaatgtgattccagcagtcattaacatgtcttggaaggacagagtgctttttgcttatgagatacttccccaggatgataagaaagtagtatattcttggctcgtttgcaagaaacacctgtgggtatgtggtctgaagggtggatactcaggctagagaggaatggaaccattaaactgctcagcttatcccagatctggaatccacagcttggcaaagagctttgtgctgagattagttagcgatgttacaggcaccagtagtcctgggagactgacaacctgccgtaaagccaggggcttctgttcacagagcagactcagaagaaaaaagtgggatataggaagatctcattgaaaacttggtggaaagttagagttcaataaatcgattcccttctagaagtctattgggagagaaacacatacaggtaacagatatggccagaatattggggcctggtttaaaaccaaaaacttcagataaagatgaattgtgaaatccattttatttttctttatcttgagcctctagattaccttaattacagaatttagacatcatttcactgactataaatattagactgcattagtttcgtttgttttactcagtcttgaactttgtatttttggtggtaaatcagccttgggtataagctgagtttcaatgttggtttttggagcacatctggcaggcagcaaagagctcctgggaattttagctccaaagatattggcttccatttgaacttaggaatagtctcagtgatggtcattgaagttttattcacataccagagcacgctgttagcttgagccaggtttgggctggccagagccccacctctgaggccaatccagtcaacctcccaaggtaggggtagggaaggtcactctttgccttactgtgttgagtgttgctgtaacagattatcatagattgggtaatttacaagagaagagttctatttcttccagttctggaggctaggaagtccaaggtcaaggggcccgaatctggcaagggccttcttgcttcatcatcccatggcaggtggtagaagggcaaggagagccaagcctgagagcaagagtgggccaaactcacttttttttttcttttttgagacagagttttggtcttgttgcccaggctggagtgcaatggcgcgatcgcggctcactgcaatatccgcctcccaggttgaagtgattcttctgcctcagtctcctgagtagctaggattacaggcgcccaccaccataactgactaattttttgtatttttagtagagatggggtttcaccatgttggccaggctggtctggaactcctgacctcaggtgatccacccaccttggcctcccaaagtgctgggattacaggtgtgaaccaccgcacctggccccaaactcgcttttataacacacgcagtttctccataacttacctactcctgtgataacagcattaatccattcatgagggtggagccttcataaccttattatctcttattaggccccatctcccagtactactgtattggggattaagtttccaatacatgaactttgggggacacattcaaaccatagcagccttatagaaccataggaaaatgcagctgcatccttccttccatcttccttgcattgtaaaattgcaattactctgcaataggctccatccagagaaatcttttgtgtctgctgtgggctgtggcagcaaccacaaggacctgtccttgcttccagggccacacaatctatgatgccaggagagaagagcacagacggttttggggtctgggatggagcatgaacccttcttgtgttggagaataggacagctttggtggggagagagaaaagtctagattgaaggaataaatggtttttcaggtgagatgcaagagaaactcataagatttttatggatgttttcagggagcggggggaaacatgaaactacaactcatgatcaattataggaccatgtaaagcagttcaaaacatctaataagcagtgtagcagatgtcaatcttggtctagactcacatggtccagaaataccacttcttaatttttccagggtcaacttaatgctgagaaactccaagctcttgggtctaatattcaggtcagaggaagagatccattttgaggacctcttcccacttcccctatgccagtgaatacggggttgctggggagtccatgtctaggttcctacctgcctgtaagggtaagaggagtatctttttttttttttttttctgagacaaggccttactgtgtcacccaggctggagtacagtgggataatcatagctcactgcagcctcaacctcccaggctcaagcaatccttccacttcagctcaccaagcagtgggactgcagacatgtgccaccatatctgattaattaaaaacaaacaaaaaaaaatttgtagagactgggtctcactatgttgctcaggctaagagaggggtatcttgctgctcctagaacacatggccagatgcctccagcctcacctctaggctctaaggattttgttttagtttaaggatctgaagaattctctctttacattcgttgctttccttagagttcctccccttgtcctcaaacagtaatctcatttcaggatacccagtattactgcgtcaaaagacttggacatttgagcatttgaacaaggaagggaagcattttgtgacacacacacacacacacacacacacacacacacacacacacacccttcctcgagtcaaggagaaactgagcctcccaatttacattttgaaggtataggatgggaggaatgaatggagagaaaatgtagatttatatctcaaaaattattctgccattaaaatgtaatacattttccttttcacaactaactcttaaggtctctagagctgagatgagatgtggagccccttgatttccctgggtaagagcttggggtgaggaattagtaaactgattcagagtttccccacaaataagagtaaatatatcttacccagcatctttaattttccagctgtttgataaccaaataaatgtgatggattcatgttgacattaaaagtgttataaacttcatttggaaggttcctattaataaacaatatttccttccactaggaacaaaattaaatctttagttaaaccgtgttttgggtctcaggaccctttacactcttacagagtcctgaggactccctgagagcgtctctttatgtgggttacttgtgtctattgatatttaccatattagaaattaaaaccaagaaattcaaaaagtgattaatacaaggataaaaaaactcattgcatgttaacatatatattataatatattttatggaaaataacaatactttccagaataaaaaaattagaggagtagctgtttttcattttgcaaatctctttaatatttgatttaagaggaaataggtggattcccatatctgcttctgtgttcaatctcttgtgattggttgctgaagaaaatctggcttcacatagacaacgctgttggaaaaatgaggacttcatggaccctgaaagggtctcagggacccataggagttttgggatcactttgagaactgcacatttaaacagataaactaccagggtatgtgatggcttttaaatgaaaaattgtctttagtgagaatttgagtcaactgtgggtgaaatcagtcccttataaatagacagatgatcgtttaattgggttaagatatattcctttcctgggtgctggttaagtctcccaggagagccagagtcagtttcatgcttctccctagttggcttaataattttgaaacacagtttaatatccacaaattcaccagaagcagtcatggtgtaattttatctttatttattccttgtgggtagatgtggtctgaaatcacagctgtggtgttttacggtgtcatgtgtcttgaatgttgccctctcttcttacagaaatacaaagagtatgagaaagacgttgccatagaagaaattgatggcctccaactggtaaagaagctggcaaagaacatggaagagatgtttcacaagaagtctgaggccgtcagggtaagtgcctatgttttgtgccctgtatcgcctgaaggcacaaaggcagcttcaggggatggcattgatgaaccaatctctcaaagataaaagttgactcacgcatctattacgtaaatacttttatttttacagtctggttagccaggaaaagcagtcactaggggcacaaactgcccttttcatagagggttcctgtgccagttttattctggtaaatgtatgccttcagcagagctgccactaattgtacagccatacaacgtgggcctgtaactgtatgatgcattcagtaatggccaaaaaccattcaaaggtacactagggttcaactaagctctagtctgagcattttcttgtgtcactgtgttttgtgattttctcaaatggttgcataacatttcagtctatgagtgtgtcataattgatataactgttcctatatatttggatgtctgagttatttgaaagtttttattggccgggcgcggtggctcatgcctgtaatcccagcactttgggaggccgaggcaggcagatcatctgaggtcaggagttcgtgaccagcctggccaacatggtgaaaccctgtctctactaaaaatataaaaattagccgggtgtgttggtgggtgcctgtaatcccagctacttgggaggctgaggcaggagaattgcttgaacccaggaggcagaggttgcagtgagccaagatcgcgccactgcactccagcctgggtgacagcgtgagactccggctcaaaaaaaaaaaaaagtttttaagagatgtgttgcccaggctgttctcaaactcctgggctctagtgatcctcccacctcagtctcctgagtagctggggctacaggtatgtaccaccacacctcgctcacttgcaagttttgacataaataatgctgcagtgaatcttcttatatatttataatggatcaaccaaccaagcacctactacaggcaaactgttcctttaaggaccgtatatgtactcacttgtattatccttgtaacacctccgtggtggatgttagtattatccccattttacaagagaggagactgagaggaggaagttgagtagcttctctgaggtcacatgaggagtgagagagagccccagtcataatgaccccagagtccgcattctttactgccgccttgctttcagtgtcctggagtgtgtttccttaatgtgaattccagaacacagaagacagttcagaggctcagaagcaatcttcaaggttctttatgcatatgaaagcatttctgtccagataaggttgtgccaattcacagctgctccagcgacagtggtgtgcaagtgcttattttctgaaatccttgcaaaaaaaaaaaaaaaaaaaactagtaacagcattgtcaatttgagagggggacatattattttagcatgcatttctttgtgaatcacagaattttagaggagaaaaggacataaatatctttaggttctgcttctacaattgacaaagtagccctggtgcctggaattaggggagcattgggagtggaaggaggagggggccatgcagcatgctgccttgacacagaggtccagccagcaccagaacctagacctcacctccttgaggcagtgggcccacgtggtcagtgagacatgggctctgaaagtagtggaactgtcccgaatctcagttctgccccaaggtgggagaccagtgagcaaagctgagtaacccctgtgaatctctttttttcctcacttaccagcctggcggcattacgagaagtcaatgatttaataaatacgtgcttacacttattgagttcagatgcaccagcccctgtgctaatcactttatgtatgcaatctcattcttgtatcaacactaggagtgagacactgttattattgttgtcttagaaatgaccaaacaggcttggcagggtgaaggcatttgcccaggtcacgtgggcagggctcagcagagttaatttttacacctaggtggtggggttgcagtacctctgtatctgtgtaaggtgtttatttagctcagtgtctggcaaacagtaaatgttcagtaaacatttgctgttacagctggttaaagggccttctaatctgtgaacatctgataggaggtagtcttgcagctttaggaaacacctggatgatgacaggagggaacgtgaactgggtttagcgtcttcgtattgcctaattttaaaacctttttgtgttaaattagtgaagataaaaaaaaaaagacgatttggtatggtgggtgtagttcctttgagaagaaaaaaataagttgctctgtttaaattgaaatattcccagaataaaggcagccagattccttgcaatgtgtattctatatattttaaaataaatgcacaggccttctgtaattacgcttgatgctcgagcctgtaacatcttggttaattggtccagtgttatatggatttccccacgcccgtctttaaagagagtttgtatgtcacgtaggggtttagtctggggatggtagagatgggccttgtcctcactgtgagccatgtggctctcttgttaacactcaggacccatatgccatttggaatgagatgtccctttggaggccagggaagcagtgagtgtgactcttttcctattttaatgataccttgattctccattaggaaaagtcgctgtttgcctgtgagatttgtgaacatttgaagagcaaagacctcaggttcaaatttgcccatgggtttgcagtggagtcattatttgtagccttgcactggaatgcaccactgtgagacaaggtggggtcctttcccatgccacccactgggcagtgacccttccccctcttttctctcctttcctctcctcttttctttttcttttctttttttttttttttaaagacagagtcttgctctgttgcccaggctggagtgcagtgatgcgatctcagctcactgcaagctccgcctcccgggttcacgcctttctcctgcctcagcctccccagtagctgggactacaggcacccgccaccatgcccggctaattttttgtatttttagtagagacggggtttcactgtgttagccaggatggtctcgatctcctgacctcgtgatctgcctgccttggcctcccaaagtgctgggattacaggcgtgagccaccgtgctgggcccccaccccgctattttctgataggtcaggaacagaacagattttaggtttggccctatcactctgatgcgccacacctaggaatcttccatttccaagcccccatccccctcccccagcagttggagttgggtcccaggttcaggtgccctaccttgtgttttcctagtgtgaatcagtggtgactccagggacgtgtgtaagagaaacctggttcacaaacaaccctgatttattaacatttccattggtgtatataaaatatttatgagcctggcagtagcaatttaggaagctacaataacaacacctttagtctgtgaaactaggttcagttagtgctgggggaaaaaaatggagtactacaataacctcgtcctttaatgtagcctgtcatctcctgcctgttaaacaatgttgatctttttctctgtctcttctggcttgatttcatcattttcctccatcacttttcccagtgattagttgaatcagagtgattttatcatcctcatctcctatttgaattactctccactatgcaattatcctatcacagaaagtcctattttctccccgtcagatgtctgaagtaaatgtgaaacctaaagtggcctgcccattacataacccctgtcatctcattggtaatggactatatgtaacttttttttgaggctagcaagttataaataaccttagcttcagtaatttccattaacataatggtgccatcattatggtagcatttcttaactaatattttctagttctttttaatgccattggtggtttaagtaattttttcacacccacgcagaggctagctataggttatttgatatggccatgctcctgcttgcttttgtgtatagcagttgtgcccaaggcaccatctctcaccttcattgttcagacatatttatgctaccaagccctcaattaatattgctaagcagtttgtcaagttttaagtccctacgaatggacaagaaatggagtccatttgcttttagttcattaacatttcaagggagatatttcacatgttggacatagaggaaaggatatgcaccagtcctctgccaactgtggattcccatcagaccattcctaagtgacacctggaaatgcttgtctgtgtcacaagtcagagctctttgatattgatggaaggcaaatttgacaccactcccctttcttctgagttgctgatgttgagaaatgtaccctgatttgaggggagggagaaggcagaagggttatattgcatgaccttggttatatggacaggctgcccccagcctttcctttgtctttaaaatccagcccttcagggggagtagcacaaactatcaatcaactgcaagcattatctggggctccagggaactctgagcaggcacagccaaatgtgcagtgggaagagaatatgtaggaagtaactgcgtaaccacggacatctctgattgtaaggatatactttgaggaccaattccatcacagccaagggggtgtcatgatcctgtaattttggtgcggtacatataactgagatgagcagcacaagagaaaagcagataaaccaggaaatgacaaaaagactttggtgaatttatgattttatgctaatattctctaggatggttttctaaaggtgaattccttctagtggattttgcctttggttgcactgaacagctctgccactgccttcatcacactgatttgagctggacttagaacctcctctggtcttctcaagtgtttctggtttcagggccagacactgattcagaggaccctaaatgtcagcctatgcagacttcagacctccacaaactttaacaggtttcagagcgggaaggagcactggggggattataggatagtatctgttgtggtagcgtttcaagcaaaacattacaattaattagttgtatctaaaagaatgaactcttttggggaatgtgaagagatataaaacacaagttgtagctagacctactcagtgatgagccaattgttttcaaaccttgggtaagatatttaataaattttgaaagcaccctgaaactcacacctgtaaataaacttaatgttgtttcacttattttttgatttacattgataaaatgataaatcaggcccttgaaaagagtgttttgcttaaaaataaatacctttgcttgttgggaagagctaaaggagactagattttatattaagttttccccccttcctatagttacctgctgttcattgtggaactgattcccattatagctttactgtggaaagtaattgctgttgtacagtaattcaatttcagtgcattcacgcatcagtccaccgataggggtttatctggagaaacctgggacttgaaagctttttatcgagaaattccacatgcagcaagacatttttcctaggaaacgaatatcagtatttgcatttaataaacatttaccttctcagaaaaatggatttttctctctgcagaagagatttacgccaatcttccaaaaagctagagggtactattaaagcaactttcttggaatgttttttgactggtgcctgtctacatatgtatgactataacatacatcagtgtttttatgggaatatatacagtgaggcatgaaaagcaggatgcacccaagtaaagcatactccatccccaaaatataagctgtataaggaattaatatctatagggactatatgaatacttctggtttaaaaactcatctgatctatagacattgtgaaaattgtgtttgaggcatactttcaaaaggattacattggaaatgaaataattgattccgtttatccatttgtaagttaaggaaaggttcttaagacagaactgattattttctttacatgttaagtccaaaatgtggaggttttaggaactgaatatagcctaacagtgccaggatcactttaagttctcaggcagtggaggtatatatggctgtatagatctaaaatatttttgttttctgtcttgttttcatttctgatctcatctcagaatttcaaagcttgtactttgaaagagcagtacatttgtttcagaaaaaaataatgttttctgttttgagtcacagatagagggaggagactattaattttttatgttgatgtatcttgtctatttgtcccctttttttggtaaactgggtcgcttgcaaaatcgtacgtatatatgtaaggaaatttagagcaaaaacctcaaaccagaagaatcttaaaaaagagcaacaatctgtattcaccagttttgatgaggtcagtgaaccatctttggttaatggctgagaacaaaaccacatggaactgcgtggtcctcgtgggtttcaccccaaatgggcccagggtttccgctaacatacttcagtttgagccaacctgagcctcacagctaagcccagaagactgctgtccctcccacgttgagagggaacaacttgtccacccccttgggggtacatgcttaccactaaagggaaggaaggggaaccactggatgacttgtatgtgtaatttcatgtcttctctcctcaagctctcagttttccatcagcctcacatcattgaagttggcttgacttggtggactgtatcctaactttcatgcttattctgggggtgttggcctgtagaaagcattcttctttgtgggtagaaccattgcatcaaaccctcctcaacttcatggttatttatctctttcccaaataattggactaaacgctttccatttgcaaagctttatggaagtcttagttttgtgttttctatgtctactgtagaagcacccatgtgttttttaatgctttttgtttttactggttataaaagtaatacatattcatcgtgaaagagaaaagaatgtgcagaaaatgaaaaaggggaaaggaaagatcacagcatgaagaaataagtttcaaacagtacttaatgtctctcaataccttttgtttttcagcatcttagtttttgtccttacaggtttttttttctgtttgtgcatgagtatatagatatgtgtgggtgtatataaacttctaaaacattggattattctttcttgtaacaggctttttaaaagattacatgttgtggacatgtcaatgaatatagatttctattatttttcatgactgctttctggatgttccaatcaagcagctctctcttagtgaacattgatggcatccgtagtgtttcacggttataagcaataatatgataaactctcttgcaaagaaacttttgtccatttatttgatgcatttattaggatgtattcctagaattgaaattaaggctttgggtgtatctttccagattgttctacagacaatgctatgcctgcctatgttcccacctgtgtggttggaggggaactatttccgcattatcctctctagtatttgactattattagtcttttggccaagtttagtatctcatggttttttgttttgtttcgtttgtttgtttttttggttttgagacgcagtttcactcttgttgcccaggctggagtgcaatggcccgatcttggctcactgccacctccgcctcccgggttcaagcaactctcctgcctcagcctcctgagtagctgggattacaggtgtccgccaccacgcctggctaatttttgtatttttagtagagatgggatttcaccatgttggccgggctggtctcgaactcctgacctcaggtgatctgcccacctcggcctcccaaagtactgggattacaggcatgagccaccacgcctggcctcaagttattttctttaattactcaccgtttggcacagtgggtccctccggctcctcatctgtcctgcaccagggtttgaggaaattacaccatgtcacacagagagcatgggcttgccaaaacagagagatggcccaggtgctgatccccatcctcccacagagaggaatgtgggtgtaggcactctgctggacatgcttggaggggccctccccttctcctccctttctggagtgtatcatgggaacagtcctgaggaggagggacaggctaactagcactaagcttcctgactttggggtgccagctgtttggaggaatcagctgggagcatcggcggctcaatacctagggactgtggtgcccagggtgtttcagcctccccactactgtgggagaaagtcagtagttgcaagagaatttgagcttggtgcagcccctctcaccgggaaggggtcctgttcccagatggctcgttgtctgagcacccagactgaccaccagggtcactttgattgacttttctgaaaggtactgtgtagttaagttgaccatctttttacatgtgtattagccatttcttcttcatttttattttttattttcatacattgcctggtaatactctttccccttgtttaactgtactatttcttttcttgtcccaacttgcctttactgtggccccagtgcctactacggtgcttcaaactatagttaagtgctcagtaaatgtttgtggattgacttacaggcctttgtcttggggtcaggataacttaaagtgagggtgatatggatggtatgggctacaccccttccctttggccagagaactcctgataaaggggaaaagaaagtattagagctcaactgcaaagcaactgtggggttcatggactttccagaatcctccactgtcggctccaagcgaatgaacctgacacagcaatgtggcaccaagatgtttgtcccagttctgatttttcagagtattatgttgttgttgttgttctacactaggccaggtagaaaacaatgcctcttaatttatactcaggccaggcaaaagcaatcttaaaaggtttgtgggtgggaggaaattatgatgggtgaattactgatgtgttaccatcaagagatccaaatgacagaagaaagccataataataataataataatgataataaaagaccactgtctataattttataaattaccagcaacaaattaaagggtttcagaaatattttgaatgcatatttagtctaactagcgatgtgttggtggcattggttgtacttttttggtctttactcagtttcccatatggaggtgaggagcagctggtcctgcaaacagagtgagattatttacattttctaaattaggttatgagggggaaaatgaaaagatagttaggaattcattggcatttcatttacactgcattcagtggagagatgacagcccttgcgagtaatcagaatctttgttaaaaatcagctgggatatcatttattgcacatcccaggcttactggcagcctgaatagatgaacatgcaaggctttgtactatcaggggtaaatgtggattttttgttcttgtatgctttttaattgatatgtgtgtgtgtgtgtgtgtgtgtgtgtgtgtgtgtgtgtcacttgggaaggaaaatcagatccttgggaatatacttagagagcctcccctcactgcacccagtgactctggagcatttcgtgagtgtgtttgatgggatttatagagaggaacttctctagtacctctgcaaagcccgtgatggatgtcagaaagcagactcctcatccagggtcacggttggagttgctcatagacagccccactccagccaatgagcaggagtcttcctacctcaagcaggtgtttctgcagacactggaagactgctaaccctaacccaggttgtggccctgatttgactaatgcaggagttgccttagtaaaaactctaggctgggcaaagattcagactcttatgacttttaaccagccatgaatacatgggtaccagctgcacagagatgatggaagcagctccagtcagactggagcacagtcagactcataggggagcagagccctgcaggcagcctcttggccagccagtgggtggcctctgttaggatgccttttgagcctggcagcctgtctccaagaggacttcccttcaaagggctcagtggatccattcccttgatgtgctgggagtctgtcattgcagtcactgtggccatggtctggggatagtgcatcagcttgctgtggtccacacgggggaattagggttggcctctgagaccagatttggtagagatgattttttttctagggaagtatgttcagtacacatgtgtttataatggaggggatgggcagaagtgtgggggttggtggttgacacatgagcattcattttcatgggaatttcgtcattggagatggggaaataaaaaataattaatcacatcagaattgtaaacctctgtcccccaggccaatcctggttgtagataccttttacttggtctgtgtgggctttaagggggaaaaatgaaatcacatataaaaatatgtagtgatattaaaatatccagatttaaatcttggaaaatggagaagtgtagccatcctgggcctccatgtccatagaaaagcaatcagcatcagcatgaatgtctctattggttgatttccatgcagctccgtagtcgtttatttgctactctggccccaaggaacattgagtttgcaacccctgcattagtcagattagggttagtagagtctatgtgtatgtgaagtaggcagcatacttagagcttccataattcccccacagaaagccagctggagtcattgccattgttttcatcattgatatcatctctgttgtcatcatgatcatcacattactgagtgcttcttgcttgccaagacactatgctatgctttgcatatattatctcatttaagtgatacttgtgaagttggatttaaaaaattcttggctgggtgcgggggaaagaccattcaaaggatttaaggtaagaatgtgcattataaggggacatggaatctttcttttttaaagttcctgaactaccaaatgagactgagattttcttcacctttaacatttgaggatgtttagctcttgttcagccctcacctattaaaagttctatttgttttgttgtctgttttctcccaatctcaaaaaggtttgattcatgtaaataattcccagtctggtcccattcatagaatcggcaaatgaaaatcagagctatcccctccctccctcaatctaccctggtccccagcataactttcctgtagcatggactgagacagtattggtcacgtggagaaggggatgaaaaatgctcaaagtggctacatttgaatatgtggcacttatctctctgcgcaggcaccttatagaaaaaataattcattaaacttcgttctagaaagaaagagcattaagccttcatcaacaacaacacaaagagctcaccatggcaggaacgggacaataaaggggttattttagcagaattaacaggaagaaattagccccatgtatccttcctttttatcacagtgtggtgcatttacatattttgaaatttcacatttgcatagtcaatgattttaaattatattctcacatctcctctctgatgtttgtcatgtgtacaacttgtcttaataactgagttgttagcatttaaaaagcagttatctaattattggcacaaccttgaaacatagcacccagccacccttgcaatttttaagcagctttactgagatataattcacatatgtataggacacgtgagcatgcatgtgtatttacttatatgccactttgaaacacatccaatgtgtaaatcaagttcaggttctctgatttatctggtaaccacagctgagaattggactggggagtgatgctttgaactaatgcctgtcgggagtgggatgaagtgcttatttctttgagaattcctgtcatttcaaagaggagaaaataaaagcttgagagtagaggtgcaatttttgtgtcttcttttcctgtcctgagctaccttcattcgtccaaggcctgtgtgtgggtggggaagcatgctcacctcacctgccccatctttccttgaccacctgtctgctttgtgggctataagttatatcagcctggggtctttgggttggctactgttaagatctagatttatagcgggctccctccccacatggagtttatgtgctattaggggagacaggaaggctttgaaatcgggagtcctggccgtgccacccagggaacccagggagtgaagccaaacatacaccaggtcctgggaggtggcagaaccagaaggaacagcacatgtgaagctggagaggaagtagaatgtgggaccagttgaaggcattgagaagaggatagagtggagagagggtttggagaggagagagcaagacaaggggtttttttttcctgctgtgaggggcatggtgtggtggaatagaggtggtcgattcatgtgtttatttcaatgtcttcctcaccacctcccaggccagtggttggtccattttactctgctccccaattttctcccagcgcttcacacacctggcttggtgggtgctaggcattcactggaagagttcgggtgtcattttaagaatacaggaagttgcggcagggtttgcatttctgtgtctgcactgctcattggccgcctccctttccctttgtgtctagggaaaagctgccatgttccccacttttctctgggtattgatgtatatgcacctgcccacccttagaaagtatgttgccttctcagtgatcagaggctgtggtgccctgagatggctcctttgttgcctgttcctctcttccagccaaatgcgctctggagactggagagcacaaatcttttgtacagcccaccgagagtgaagcccccggggcagcactcagggggagggagctgggaagtgcagccgcctctattgtgctgggagaaagcccgagaagcctgtgtttaagggaagcaaagagcctgctttttaattttcagctacatttagcagatggaccagttcaggattgtcctgtttagggaatctcccccaacatttggacaattcatgggtggagggaacctcgtaggagccagcccaaaggggaacgtcacctgttagttctccaagcttgtgtcccattgggtctcacctctctgaggcagttataaggagacaatgcataatttgctcactttcagcaatggctgtggttctccaagcacgctcccttaacctgcttcattggccccagcaatttaagaaggtcagccttgggaattacttcctcttgtagaagtggaagtgcagggactttgccccagtcatttgttttatgtgttgactttttaatttaatttaatttttttttgagacagagtctcactctgctagctggagtgcagtagtgtgatctcggctcactgcaacctccgcctcccgggttcaagcaattctcatgcctcagcctcccaagtagctgggattacaggcgctcgccacgacgctcagctaatttttgtattttcagtagagacggggtttcaccatgttggccaggctggtcttgactcctgacctcaagtgatccgcccaccttggcctctcaaagtgctgggattacaggctattttgtatgcagactttgatgcacttagatgttcagtcatctcttgggaaacaggttcactttggaagggagtgaactgggctttggagctagtgagacctgaggttagccattatccactgacagtgagatctgaggttagccattatccactgacagtgagacctgaacctccctgagtctcagttttcttgtctgtgaaatggacgtgttctcatgtggcagggattgtgactctctggatatggcaagaatggatttgaggctggttccctcagactagccccaagcccaggtcacacgctccctccttgagatggaagcaatcacacgagtgacctcaaaactaacatgaggatcaaatgagcaaacatgggtctggcatgagcccatgggttacatggcgaacactttgtaaatggtcatttatttttatttgtatatgtaaatagtaccttttacaaccagcatagcagaagcaggctctggtttgggcaccaaactcactcagctcagatcctgtcctagtcatttaatagctgaataatcttgcccgatttacttaaactccctaagctttgggaaccttaactgtaagatgagggttagaatacctacttaatggagttattttgagggtcaaatgagaacattgatgtaaagtgttttagcccagtgcctggcacatagttctacttcctaaagactagttactattattcttggtctaattattaatataatcatacagaaagtatggatatgatagaacacttaataggaatatttgaagaggttttaaaaattcagctatggcaaatgctactattgcaggacaggggtcccaatccagaccccaagagagggttcttagatcttgctcaaggaagaattcagggcgagtccataaagtaaagtgaaagcaagtttattaagaaagtaaaggaataaagaatggctactccataggcagagcagctctgagggctgctggttgctcatttttttgttatttcttgacgatatgctaaacaagaggtggattattcatgctttccctttttagaccatatagggtaacttcctgacattgccatggcatttgtaaactgtcatggtgctggtgggattgtagcagtgaagacgaccagaggtcactctcgttgccgttttggttttggtgggttttggccagcttctttactgccacctgttttatcagcaaggtctttatgacctgtatcttgtgccgacctcctgtctcatcctgtgacttagaatgcctgactgtctagaaatgcagcccagtaggtctcagccttattttacccagcccctatttaagatggagttgcggccaggcgcagtggctcatgcctgtaatcccagcacttttgggaggctgaggcgggcggatcatgaggtcaggagatctagaccatcctggccagaatggtgaaacctgtctctactaaaataacaaaaaattaaccagctgtggtggtgcatgtttgtagtcacagctactcaggaggctgaggcaggggaatcgcttgaacctgggaggcggagtttgcagtgagctgagatcgcgccactgtactacatagcctggcgacagaggaagactccgtctcaaaaaaaaaaaaaaaaaaaaaaagatggagtttttctggttccaatgcttccaacactactatatctcagggaggtaacctagaagaaactctgcctcctcagaatcccaggagacttgtctgcagggcggccccagtgggttatggagagctcccatctgtatagtcttcttacgcatggacgccctcctgctctgcacagcctgacttcctcagctgggcagggtccctgacacggacaaggagaggaaagtgaaggtgaaacaggctctgcattgcagtgtcttccttgggcacagagggaggggcttcaaggctctgcttggtcctctcattgctcttgcttgtttgagagagggagaagctgcaggttaaacagaatgtttagagaggaaaactagattggcagcctgagctcattggccccagcctatcagtggaatgcaggatggtgtccagtgtgaatgagcatcaggccggtccttaatggagtgatgtacctgtgggagcccaagggtcacacgctcatagctgtctaataattttaatagttacatgaaatttacattataacaaatataacttccttttaaagtggaagttatatgttatgtacgttgattcaaagaaacatattaagtaaaggtgaggtgagaaggccagttgcagcctggtttttgaaggcagctagagactccctagaacccatcattagggaaagggacagttcaaatgtgctggatgtggttgcaaaagcagtgatcacatagcaacccacactgatcttgagcgaaacaatgcataagaaatagcataagatttatagtacagtagcatctatataaattaaaagtatataaaacacccatatgcattttctataaacacatgccccattaaggagtccattgaatccattagagtgggtgcaagtgggggagggaataagagtagaggtcagggctgaaggagatataaatcaagatggggccttgcatggaccagtgatgatgatgtgctaagagtatgaatagctcaagtttctgtatatacacagacatagaacgagacatagacagacagacagacagacagacagaaatccgcacacacggtggtaggcagatacggcaaatggtgatggtggtatgctgatgtctgaggttggagcagtagtgcaaaggtggaaagataacatttacagtgaacttttcttaactgctttccttgtacctggcttcccaccttgtgcctaagacacatctttgcattccattttctcaacaacctcatgaggtaggtggtattattacctccttttgacagatgaggaaactgagcaggtccagcgtcccagagggaaagcttggcagagcagatgcaggtccagtatgtccaactccagagtccagatccatcagtgacattgctgcacagccttctttgtcttagaattcctttaaaatggatgcacttttaacatccttattaatacctgcattgcttaagttctgctgtctctgcattagtggaaaactgagttgtcccacagtagttgtaggccctattgagaagactagactggtccttttccagtggagggggatttattgatgccatccctttgccactcctgatacttgatttcatgcctctaaagttccatgtcttttcgcttcctttctttccgccattccctcctcctccccgttaataagccagccagtcaaatagcctcatttcaaacagcatcttcaccctcctttcttccaataggtggctatataacattggcattccatgtatatgtcttcaaagtgatttatcagaaagatgcacaactccacgggaggtggctaagtcacctggaatgctttataggttatttcattgtccacaggggtagatcaagccatggacacccctttttggttattaagacacaggctgccacttgcatccaaaacgtttgggtgccttaagtgagtgcctcacttgtctggctcgatggctgttggcagggctgtgtgagtgctccccgaggacagacaacaccagtaaatcttaatcactatggagcactatagaagaagtaaacagttctgaaactgtgctataaattgtcatccagtgatgattctgttttattatggaggttaaattacagcaatcactggcgcacaaaggcgctgcagtaagaaaacatttgggaacaatgtttttctcctatggcttgggtgatgggtgcacaggaataaaacaccataacttgtttaccgtgggccacaaaggaaaatatgaactctaacccactgccacatgtgtgctctttttcttttctgaaccaggcaggttgtgagcatgttgctgttgccacaggaaaaggtgatagatacacttgacttgaaaacagctttcagctgtgtttttcttctttttatagctctcttcatctcccctccctgtgtgtgtgtgtgtgtgtgtgtgtgtgtgtgtgtgtgtgtgtgtatctatttgggttaggatgggctaggagaagatgagccagagaatgacacctgtcttcagcaatcagtcgcttacagatactgtctttctggcattccccagcatgctgtccaaagggcttgtcgcttatgggccacttgattattggtgaagaaaatggtctgtgggacctcctggatccaggttcaagtcctgactctgcctcttgatcgctttgtgacttagggaaggtcatttctgtctctgagcttccagatcatctgctgtaagatgagagcagtgactgccctggctcgtggggcttgaggaaggaacggcctgtaaaacatgtgtcccaattctgaacacacgccaaagcccattaattgtcttttctagttatcattgtgtagccacagcagctattagcagcatcaccacagacattccagcatcccagtagccaggttattttctctaaccctgggattatttcgcagtctatagaatgtatacatcaaagcaaccggtattaatcctggaagttcggttcgttattgcagagaacttgtcatcctctatgatttctgactttatttacaatgaaatcagaattcattggcaaggccattgaatggtcctggccacgcctgtctctcccagcccctcttctgctgagttccctccgggacctccctcaagctctgtgaatgtgccaacctcttctctcttctagagtgcccttgcatgcagtgttctctctgagtggaatcttcttcaccaaaatctggtctctccttgatattcagggttcctcttggattcttctctttggggaaaatttcattccttggccctcttgcctaaggtagaacccctttcaccctaccccaaatacccccttcacccctaacacctcccaccacgaccgctgttacgctatcattttctctcatgttgtcttgtttataccttttcttcatagaactcgtcagtatttaaaattaccttttaaggcatctggctctcatttgctctcccactagaactttagcccagtgaggagaaggactgtgtgtgtttagttcacccaggatagtgcctcctgtagtgcagacatccaggaagttcatggaatgagtgaacgatcagaaatttttctgatatgccagagatctgatcagaatattttacctacaacaatattagaaactcgagtaacttaaataagttttctttaattaatagccttttaaaatattaggcaacagcactattctttgtgagtgagttacaggatgcactctagtgggtagaattgaaactactaatggtaccactcactcctgttaattacagggtggaaagtcataggaggtttaatcatcagaccctaattttcttgtgactttaaagagtaaatatttattgagtaactaattatgaattttacatacatttatttaaagatgctggagagttatttcttggagaaaagatttctccaaaggtgatgagtccatagtggttatctcacttttcaggatgacaaaggacaaagaaacgtgacagtactcaaagagaaatgattttagaaaacttaggttatgggcaagtttatcctattgattttgaaagaaatacttagaaaaatattgcttctaccaatgctatttttcaggtttgtgctgatagtgttccctactcacaacattttattatgaaaatatccagacatgcaacacaattgaaacaaatttgccacacaaacacccatacaccccccattcatatctgccattgatattaagtatcctcatttcatcacttatctgtccatctctctatccttctagccatccattaatacgtcttatttctggtgcgtttcaaagtgagttgcagacttgttatagtatttttaacaatccatttgtccatgaaaaagaaacatattttgtcaaggtcaggctgatataaaagcttaatatgtttgaaaagaaatgaatataaagtgaaacagaaaacgtaccttcttccagtatttcaaaagaatgggaagcagaaaggttcatggtgctgtcctgctgagtggtgttccatggtgtggaagtaccatagtttatttatccattcacctgctaatggacatttaatgtaatgtgactggtgaagtggagcttgttccaaatgaagtgagcttttggatttctgtggttctctggtaatagatcctgtccattttttcccctttctgtacagcatccactattctacttcctggttttccatggagatctgtcccttcttgatccccagtccacaaggcttggatggggcacatcccaggtgtgagcacaaggctgaagtttgtctaatcagagggtccccacactcctcaccacagaggtatgaggtcagagctgctctggtctcgtcactgacctgatctcgtctgtttccattttctcttttactcactgctccccacttccctgctctgaagcttcacgcctgctgtcccctcacctagactgctcttcctccagatggctggtggcttgccctggacttcttctggtgtctgttcaaatgtcagttctcaaaaagactttccatggtcactttcactaagataactctccagcccttttcatcacatgagctaatacttctcctatgttgcttaagcacctttgagttccattaaagaagtccgggtgaaaatgctgcatttgttcaaactgccttcagtgtttgttctctttatcttccaagtttctcaacccttagactctaccagtggctgatcagtcatcctgatagtagagcctcccggggtagatcctctgagccagttgctaggttccaagctatagtgcccatcacctcccagctaggtaacttggtggagatttactgggaagctgtgcagagagactatgtgacccggaggtttggcatagagacaaactcagaatgggagcactccagcgtttcctctgacctgaaggggtcaggaaggttggttcaccctggcatctggtgtacataggatggcatcacacagataatttaaagcctgggagcatgagtttggcattattactgctactagcgtccccttctttcagagctcaaaaccctgagaggttgccaagtgtcagtagcatctccagcaattgatagctactaggtatttagaaccttcctcacttcatccatctgctggctcttacagtagatccaaatctttatattatcttagcttctgctatgagacctccagagtgtatgtaactaactgcactccttcaagctagagtgcggtttttttttgtatttttgcatgctgagtacttagcatagtgcctgggtcaataatgatagtacttgttgaattagtagaatgatatataacatttattaagtgtttccagtgatcaggcatggttctgattttattacatgtacaagtttatttaatcttcagaacattaaggagtagatgttgctatctctccatctcgtaggtgaggaaactgattcacagagctattaagttatttgccaaagaatacacagttggcaagtgggtgagcttggacttgaaagcccatcaatatctatttaatatttattttaatcatatgtaaaagtactatagcagtagtataatattactgtctcacctaaacatatattagaatgtttatagtagaataccataggccacttatccactggacatttattggaccatgattgcatgtaaataataggcattagagggatttaaagatgagtaaggcagcttcaggatcagagaaactcctactgttgagttagtaatagaaatctacacaaaaagcagtcctatgaggcagtggatctgagtatcattctaaaggcataaaattgcgttgaaatggtggagattgatgttgttgtatgtgcatggagagggcatgtgcaggctggttggtaatgttgggaaggatacggtggggtggataggagtggggtagatcatcccgggtacagtgtgattggtgacttaggagcaggacatcttcctgtgtgaagctgatgcttcagagcttggagtcttgtgttccctccaaaccagtagcttaggtgacaaatcattgataagaacggcactgtacaaattaccaactggtttaaactttgaaaacacctcctgagtttcaggagataaaactgacatcaataacgagagtgtctaaggtggtcaacagcaactggtttgaaggtgatgagatgtgtaatttaccacttgcagaggtggcgagatgcttcccgaagcctgatctgggctgtagccacccagccatagctctcgggctgtgcggggcttggcaggcagccttctctgagcaggaagcacctgcctcagaggagcatgaggcccgggggggcccgccctgggtagccgcacagagtttgcacgtttgtgccaagaccactccttcacatcacaggccagtgtgtgggcagacaccctcacacactgaaaacaatttactgtccttgctgcccaaagtgacctttcttcaatagtgagcagttgaaacagatttattgcattaagcaaatttttaaacttttttttccctcttgggaaaatttgtttaacccagagaagtgcttctaggccttcagtgtgtttaaagcccccccctcccacgaggagattgttaaatgcaaattcctgggccctaccctggagagttgattcaataaacttagaggagggctggagagttggaattttcttttttaatttttttttaagagacagggtctagatctgtcatccaggctggagtatagtggcaccatcatagcccactgcagcctcgacctcctggtttcaagggatcctctcaccacagcctcccaagtagttgggactacaggcatgtgcccccacgcccagctaattttttgtagagatgggatttcaccatgtggcccaggctggtctcaaactccagagctcaagccactctcctgcctcagcctcccacagtgctgcgactacaggcatgcaccaccacacccagctaatttcttcattgttttgtcttattatgttgcacagcctggtcttgaacttctgggctcaagagagcctctcacctcatcctctcaaagtgctaggattacaggtatgagccaccatccccagtggagagttggaattttaaaccctctaccccccacagcccaagaattcatgggatctcatttagagaagccttgagccagagtagtgatttctaaagaaggacataggatacatctctgcagtgcagggagtaaatattgaaatatctcttttaaaatgcctatttttgtttaagtttagagtatacatggtagagcaatagtatattatgataatgtccataatcgtgatatttatacagtataatattgtgcataaatatatctatttgtaggcatatgctgactttttgctgatagaaatatgcattttaaaaaattcagggacagtttaaaggaagtttttacgaattattttgctgcaaattatctcaccatgtcacagataattggaggaagtagtaatagaatattacagtctacttattattagggactaacaagcatcattattaaagggcactgctgagttaggttcccgcagcctctctctcacctctcccgtaggctccctcctctgttccagggcaccctgcagttacagcagggagtgcttcatcacctggtgtctggacttctgacttgattatgagttctttgaaggcagagcagtatgtctttgtgccatttgtgtctctgctcccacctcagtgcctggctccccaaatatttggtgattgaatgagggagggagggagaaagggagacctatccattgctttctaacatgtccttggcactgctggaaaccataaagtaaagcaaattgtgttctggcaacgagaaatcatttatccccatacaattcttttctgcctcatatgccatctaaccagaaggtttatattcctcaggcaacttttctctaggtggagacagactcacaggacctggcttgagttccagcttggctgcttattagctctgtgacgtctatgtagaaattgagtctcctcttgggtgggggaaggggagtgtctcagtttccccatgagtacagtaaatgagttggagtgacccagctgtcagaggtgtgtgaaccagagcactccatcttaattaggagctgggtaaaataaggctgaaacctactgggctgcattcctagacggctaaggcattctcagtcacaggatgagataggaggtcagcacaaaatacaggtcataaagaccttactgataaaaacaggttacagtaaaggagccagccaaaacccaccaaaaccaaaatggccacgggagtgacctctggtcgtcctcactgctgctctcccaccatgagcgccatgacagtttacaattgccatggcaacgacaggaagttaccctatagggtctaaaaaggagaggcatgaataatccaccccttgtttagtgtattgtcaagaaataaccataaaaatgcacaaccgacagcccttggggcttctctgtctgtggagtagccattcttttattcctttacttacgtagtaataaacttgctttcactttgccctgcagactgaccctgaattcttttttgagcgagatccaagaaccctctgctggggtctggatcgggacccctttcctgtaacacaacctccagctatttctgttttttccttcataatttttgccttatctgagtagtacctgtagaaatgtttaacagaatgtttttctttacattttcttctttttttcaatttattttttaaagcaggcttttaaacactactgctgaagggaaaccagctggtcatagaagaagatacctaagagggagagtgaatccaaatggccttgctcagttctagctcttttccatgacctgcaaggctttcatcagagacctgtggtgagagggcagaggagctgggatcggagttcccgagaggctgagacattgtttttccttgtctcaattaagaggcatcaaggagaacaggaaaaggaagactttttttctctgtgaggctcagtgtcacttaatggagtgtctagcgactaccttctgtcactccccaaagcacctctaagcctaacgtcatctccactggcctctacctttgctgtggaagagtctaagtctttgcaatcttagataggacatgattagttccaagtctctcttgatgctcttttttttttttaaaaaaattgcatgtgtagaatctgaatcaaagttttgcaggaaatcaggtgttgttttctgttaaataaatacagggagctggaaatttcccacttgtgtcatgacatctgtcctcccatgccaggatttataggatgctgcccctgaacctctggactgagtggacctttggtggaggctgggggtaagggaggagggttgaaaaacaaagttcccatcctcaaggaggaggaaaccatatcctggctcaagatgtttgatgaccctgccttgaagttggggtgttgttagttcaggcctgattcctggtgattcatttgtaagtgttacttcccgagatgaccgtaaaacatggcatggaggtgaggagacggatgataggatacagaagcctccgtcagagcaacctggcccactgctctcatccagtgtctggtccaactcagcaccagggagcacagctgtgtgaagagatcattttgggctgttggagtagccagcatccacgagaatgacatggaattgatttctcctttagaataccaaatagcctttgccatagttatctgtttcctcttcatgatatgtagatgttaattgtatttgggatctctgtgaatttgtttgacatggcataattgttacctgtttttcttctcatgtggtcttaaaaattaatatatgttcttgggagaacaggtttaggtttacagaaaaattaagcagaaagtacagagaacccccatttacctccttcctgccccctccagtttctcgcattattaacatcttgtattagcctggtacatttgttgcaatcaaacaaatactgatacaatactattaactaaagtctataatttccattagggctcactctttgtgttgtatagttctaagggttttaacaagtgtgtaatgtcctgtatccgtcattaccgtatcatacagaatagtttgactgccctaaaaatctgctgtgctcttggcaacctttgatccttttactgtctctatagttttgctttttccctataattttaaataattggaataaaatgtgcacaacataaagtttaccattttaaccatattcaatttttgagtatacaattgtaagcatacagtttaaaatgtacatgcatttataatgggtttagattcgggcaagtggctgactgtgaaggttacaaatgcgatgaggaaaatgacaaagccagccatattgttcatggcaggggacacattgcaatgttgatggagccttgaccacagacagcactgtgctgcatattttatacgcaagggcccggttggcaccttatgcctgctggacaggcagatgttgttattaccccttcacccctcacacataggaaggagctgcagggagggagtggctcaggccatagttgggaaagctatgattaaacctccatctgcccaaccgcaaatttccatctcttaaccagtgcactttcctgctggcatagaggtttgaagaagtgttttaaatgctctttgggagtataggggagctgtaatatgaaatccctttcattttggagaccagctgaagtggggatctttactctgccttattaataagttctttagacggcaacttaagatgatgcctcagctttctgctgctcatgtttctatcagatttgatggatgccttgtaataaacaccctaaacgcagaatctacttatttctatattaaacatcagatgtttgtgggatacagagaaaagaatgagattgtgctgtgtcaggaccaaaataacttatgttggttgacttaaaaaaaaaaaacaaaaaacaccatgggctccttcttcatagaaggctcctttagggtccaattgccagggaccccatggatctggtaagatgattccaggctcctctcagtcctatcctcaatagaactggtgcttccttgcctgagacccaccgtgcctgtataaatgacctcaatttccttccacttgctgacatacttgtgggccctagaaggcagtaccctcccatggggcttggtacactgtaggctcctaataaatgtttatttaataaatgtaattgtatagggctatatgcttttcgaagcaggcccatatacagaaagccacatcatacatttatttgactcctatgtatgtatgtgaatacaaagaagttaatcttccttaaaaaaagaattctgagattattctgctcttgggttcattggagtgatgagttgattgcatcataggtttgatcaagaacacccaaggtgtcagccaggaattaaacattcacttcctgacagtaatccagttttctaaccacagacccctttgctgccctttgaatggattcaacatagtcaattatcattctttttggaatttggcccttgttgctctcagcctgagtaagtattggtacgttttggtggagttatttttgatttcactggctgatactgtagctgaaagagctgtgacccatgatttatggaaacattttaactgcaagataaaatattttttgattgacagagtctccatactcaagtcaaaatgggtaattttcttataattttattgctgatgttctgttatctacaatattgtgtttcaagttagaaaatgcatgatactatgaactcagcagagacatctatttctttttaaatggaaattcgaagcacactatcaggactctcttgttcgcagaagaaacactgcttatttctttggccgtaactcaagtttttcttattctggggattattgcaaatggcactaaaattatttgctcatctttcttttctgtcaagaagagagatgctgtgtcagaaacacacctaattgtgactgttgtttttttatttttatttttttgagacggagtctcgctctgtcacccaggctggagggctgtggcacgatccccactcactgcaacctccacctcccagttcaagcacttcttctgcctctgtctccccagtaacttggatcacaggtatgcaccatcatgcctggctaatttttgtatttttagtagagacggggttacactatgttggccaggctggtcttgaactcctgaccttaagttatcctcctgcctcagcctcccaaagtgctgggattacaggcatgagccactgcgcccgtccgactgttacttttttgattagcatcctgcagtaggaagtgagagactcttggttgtgtcccagggagggagagagaaaatgggtctggggtggtagaaaactaaagaaaggcattttggggacggggtgctgagtttctgagctgttcttgcaattgcagctctcagctccacagtcacactgtggggttcaagaacagggacttaggagggtggcatgaagcagagcaagaggcgcccacacaccccaagcctgctgagactgtggattgcatgcatcctggcctggcctcctgcaaccattggttctgaacgttgcgctttctcattaggaatttctcattaggaggcattcctgagaggcagctctttttaggaattccaaagcaaagacttcatggagcctatcagcaataccagccccatctgtcacacctcctcaccacagcccttaatggctcccctgactctgagccaagctgtttgcttcttatcttttcggagcattgctgtgtttatctttatttcactatgctcctttaatttttgtctgtctaacttttcattatttgcttccttatctatacaatcacccacaagcttcttttttctttttaattaggtttaagcttcattgtacacaaagcttcctgaaaaatcactcccccctcccccaggcatccatcacgtcttcccatgatagcaggcccatcttggctttctcaggggatgtagtgcgcatctgttcatgacttctttaagttcttacctcagtgtttaacctcagtcctccttcctgtacctgagcatcagaaatctgggttcttgttctcattgttcagagcagttgctcatcttctatgtgtctgcgtatgctggctgccatgacgtaaattctctttaacacattccttggacagagggcccattggttcagactttggtcatgcatttgtcttgtgttttggcttctggtgcctcttttgacattttatgttcaaagtagctaaattaaattataccttcaactctggctgctgatcatggaagacatagctgatctcccagtgggcagtgtttccttcccccttccagttgaaattctgttctttcagaacttgtattgtgagggcatttgaatggagagtgtctcctcctcttttttttatttatttattaaaagctgttaaaataactgtactctcttgctgagaactccaaatgggtttctagttacacagtgtcattttagttcttatatgtttatttaaatggatatttcagataagtatattttctaatggagattaatcactttttcatttttttttaaattaagcatctattgcattttaggttctatgccaggtcccaagatagagaagtgaagaagacagatatggcctttctctctctgggcttgaagtctgagtgtcagtgcaagtggaggggtaccactgactactttaggattagcgttcagaggctttactgacaaaagtgtaggccattttaggttcttctaagctaactgcaaaatagttcacactttcacattttgtgcatgctttattggagcatatttggaaacatctagaagtttcaagatgatgggctcaactgttctgttatcaacaccagccacattgtatcctcttgctcacaacccaggcaaatgctccacaagagtgagctttcgagatactcgaagcatcaaccttgtaaaatactgtgaattttgtgggacatgtgttttcaatgtgttctctacctgtctgcttacctggatggtattataacttatcacttcttttgtggccctgtctcacggcttttaacatccatgtgtgtgtgacacagtcacttggtaagggcatacagaagctgtttgcttctaggtcagatgtttccatactgcttggattttgagatcttgagtctgtttttttttttttgtttgttttttttttttttttttttgagacagagtctcactgtgtcgcccaggctggaggcgcgatctcggctcactgcaacctccacctcctgggctcaagcaattctcctgcctcagcttctcaagtagctgggattacaggtacctaccaccatgcccggctaatttttgtacttttactagagagggggttaccgcatgttggccaggctggtctcgaactcctgacctcgagtgatctgcctgcgttagccttccaaagtgctgggattacaggcatgagctaccgcgcccggccttgagtctgatttttaaacatttttctgtctcttttttccttgtcagccattggtggcttcctgctgctgcttgccgccatttttaattttactgcatctaagtgtgttgtgacttgggaagtcatataaacaagattgttggaatggtgttcaaactaataaagtgtttgtgttctctgctcaaagcccttcatctaactcttgttctcagctttgtctccgtgtttgaaggttcttagtaactaagggtagttgtgttgtaataactttaaagcgtgcttcatttcagcagtttatatggttccattttgtgtttataaggtgagaaactccctttctacaagccagttggtaacctcctctttaaactcactgcaccaccaagcacattactctttgccaagacagttcttggaacctctgccctagcctctctgcctaccaccctatataatagcagggctgtgccctgttgtcaggtaactttataaagcacatcctagttttatcattccttgctcggctctctttcggcctcctggtgccttatgcaataaaatgcagatgcctaatcttagcattcaaagatctcgcagagtggtctgaagctacacatcagattcatctaaacccatgttggatacctcctctgcagagtctgatttctcctttgcagcacttctctcagagtctgcagcaaattctccctcctggtcttcatggctattggtgctttgtttttgatgacctgtactgcatggatacgtggatacatacgcttgtgttatttccccaggtgatgataggccagggcattcttattcttataatccacttggacttggcacaatggaaagtcagacagcaaaagggtcacaggatagcaggtgtacctgatttctagtcctgggtctccctctctgcccatcactgtgcaagctaactttattcctgggagcctctactgagtcgtttataaaataaaggtggtagtagcacctacttcgtaggatttgtgcgaggatagagtcctagggtactggtacagttaaagacagtggtgtggtgttgatggttgtgtattattactcctccttggagtagtagtattattacccctaccagatattcaataaatgcttgttaaagtgaactgaaccttaacagtttgttctgtgccgttcacagacatcaacctgggaaaagtcagttgtaactcaggaggtcacaacaaataaatcagtgtgtggaaaagtcacagacataacagcagcagctcctgaggtttggaaaggcccttcccaatcggatcaggcacttctggtcccccagggagcagtagagcccatgctggatggcacaaagcccccgcagtttggggtacttccacaaattgcagcatgctcccaaatgtcaccttccactgtgagtagaaaggcagtggtgcttactttattcaaggaaaatacacaccaatgttagcaacaattaacttccagaagtcttgggatacagttgtggtcataaatcttgataagttctgaccaataaatttggtgattttcttaaacaactttttttaatttttaattcttgtgggtacatagtaggtgtaaatatttatgcggcacatgagatgtttccatacaggcgtgcagtgtgaaataggacatcataaagaatggggtatccatccctgcaagcatttatccattgagttgcagacaattcatttacactctttaagttgttttaaaatgtataatcattattgattgtagtcagcctgatgtgctatcaaataatagatcttacccattctctctgttttcttttttgtacccattaaccatccccacttcccccactagccaatttggtggttttcttgtcaccttatttaagtcgtgcagtcttactggtagagctattccctcaaagtcagaaatagcagtatagttagggaagcagaatttctttgtagctctgaaagaaatgcagagatggaaacgtgaaatccttgggaatggttgatgtcttcttatggtttgtatccagcagctgagtgtggaatctctgagccggactaacatgggtttgaatctcacctttgccccctgccagcagtgtggccctggttcagcagatatgggtataagaaggtccaggaatagcattttttttttttataaaggtaacaccctccctgtattttccaggtagttttgattatcattggagtttgggaaccacatctctaaagcaaggcattctgatgagttatctagcattcccaccgcgccccctccctgccacccaactctttcccagccatgcagtagcgcagagtagtgtttgaaaatgctagcctcagctctgcatcctgaaatgaccttgtggaagcattcccttgtctccctgtgggctttagggaaggcagtagattagggagatgaaatgccagagaaattagccaagccatctccctgcagacttgggcttcttgccacctggtcctggtctaaaagttaggccagtcagccttgctccaggagaggtgcagaagcctcaggaaaggcccctcagggtgatgcttggttctgtactaaggagaactattcttccgtttagaagttcttcctggcaggacggctttttatcatgtttgcccgagattcccattactcttaattgccttctttgtgtagctttggccattattttctttcccctttagtgtttactctgtcaaatatttaagggcagttatcatgtctctttagccaagctacacacattcaaggtcctttcaacttctcacatgaatctcagccttccagcccctcagcacctacccatacgtgctgtgcagtgtttgctttggatcagaatttggaagcggaggaatttttctccttagagttattggcgtcagtgtgcactttatgagtctgctgcaaacaccctcacacagggaattaaggagacacgatccagtttgctattgttttaaggacagcccagggcctttttgcccttctgatgatatctctttaaattgaatttgagacatgggcaaaagtcaacaaggactagtgtttcagtactttaaagcttataaagtatgaaggatttttttaaggtctaaaaccaaaaaaggaaaaaatgcaagtataatttaaaaaaaatgacaaacagtgctgtggtgagctgcaagttaaatgaggttctggtggttttcatccaagggcccctcctgagtgtctctgggtctctttcttgtgcagtcagaattttctgtcagtgctcttacttctaagcaaagccaattgaatgaatgcaaaattagccaaaaggaaaaagaaaaacaggcaaaatgatttaactattcaatttaattcctcttgtcattctacctcgaggctggagtgtgggatctaagaccacgtctgctggaccccttgggctacttggttctcatgtgtctctccctgagcttgagtgggattccagcgtttactgatacatatcttttgtacagcacagtctctaaatgtaagccaacgactgcagcttttgctcaacaacaatcataaaaacaaaaatcttttgcaacaccagaaaggaaaatgactgcgttggatgtattgaaggatggcttatgcgtttttattccttcaacaaaatatttattttggattttctctgtcctgtttatacatctgggcacttgagataccattgtaaacaaactttatagtcatggcatgtgtttgtgtatgaaaaatggtaagtgtgcttcagagaatggaaatgatatgagagagtgattggggtaacctctttagagtgggagatcaggggcagtctctctgcagatgtgacagtttgacactgggatctgtatggcctgaaggatgaggctgatgagatggacaggggctgggttatgtacaactttgaggctaagattaggaatgtaggtcatacttgaagtgcaactggaggccattgaagtgtttccagcaggaggagatgtgatctgatttccaatccgggcactccggctgctgtatagagactagtctgcaggagctagagtggaaataaaggccagtgaagggtctctggcagtcatcagtgaagtgatctggaaatggggttgtatcagtagagatggagagaggtatggtcaggatatatttgaagttagagtcatcaggaattgttcataggttggccatgggggagcatgtgttggccatgggggagcatgtgttggccatgggggaaggagagaaacaaatgatgctcctaggcattgctctacagccttcagttctgctctggccatgttaagtttgagatgtctattacacatgtacctggagatgtaaaagatgccgttggatctgtgaggcctaagcccagggcaggagtaaaggtaggacatggaggccttggaggattgacatatggatggtatattaagtcatgtgtctaggaagaggctacaaacaggaagagagaagaagagcccatttggactgcatgcccatttcgaagcataaactcgagttagtctggagacttcatagtgcaaagtgcatgtgtagccaagctcttcactgacctgatttcagtgattgctctgaaggctggtcatggggccagtgaccacggaactgctaagtccttggtcagtaggatatttggaggtccccaggactggctggaccaaccacatcctggattgattttcttacaaattgcagacttcctggctgacgtaatctgtgatgacaatcccacaatgccctgattgggtgggagggcggggacattgggagcagctccctcagtgaaatttggacagcttttgacagggccaggatcaacaatataggttaattgtcattcaccagagagagaacttatgggataaaactgagttgagcttatggggtggtgtttcaaaattatcctttttggccctctctgtgtgggctgctgttgtccatctgaaactcatcgttgttgtgttatatatgaactaaaaactgtctttcagctttgctttttctctttgctgagaacttgcagagttcagtgccaagaggaggcctcaggtcattgcaaagacactgctgactcagttttttgtacctaatgaatctttattggcaccgaggtctaaccttgacacagtgtggtgagttatgccttggcagccactcttaggcactgcattcctgtccctgtgaaaccctttataaataatgtgggctggctcacagatgctgccagcacacagagccttcgagtagtcttaaaaaatgggaagtagatgggatggtgcccttaaaatacaaggagcgttcagcgttaagtgttgatgaatatcactctaaaaatactgaacaatttttgtcagtgcagtttattgaaaatgggccatatgagtctatacagtctgttacagtggtattaattttaaaaatttgcattcctccatcatcagtgttttttaaaaaacactttcaggaatgataaacattcttgattcagactctctgccagcacttcctcattttagcttctatgtcacttttctccctgggttttctggcagggaaaattcttcctggtacttagcaaaaatacagttgcatgaagcttacttagggcctttgttttgtcatttaagagacatatgtaggaccccctccttgtgggctgccatgattggggactcaccgtgaaaggtgaccacacatggctcctcccttagctttggttcctcttggtgtgatgtgatcaaggttattgacaccctagtctgtgccacactgtgagctctgcgaattcatcttgttcgccactctgttttccatggcaccatgttgcccaaagcatgggagggacttaatgcatatctattaaatgaatgaggcatggtcagcgggtgcaattagctctgtacaaacttagaataaacaagtcattattatgtggactcgagcatattgaatatcaaatcttgcctcttggaacacaacaaatacattcccaaaaagctgtcataaattgatgtgatcacattcacatcttttattgaaatataaagtgctcgacatcaattgctggtgaggatgtgaagcaataagaactcttgttcattgctggcaggaatgcaaaacggtaacagccactttggaagatgacttggcagtttcttatgggactacacatactcttaccatatgatccagcaattgagctcttttgtatttacccaaatgagttgaaaacgtatgtccaaaacctgcaagcaaatgtttatagcagacttactcacaattgccaaaacttggaagcaaccaaaatattatttaataggtgaatggataggcaaacgatggtactgcagacaatggaatgttattcggtaataaaaagaaatggcctatcaaactatgagaagacctggaggaaattcgaatgcaacctgctaagtgaaagaagccaatgtgaaaagtctacatgctgcatgattccaactatatgccattctggagaaggaaaaactgtggagacagaaaaaagatcagtggtgtccaggggtaggggagaagcagagacgaatagaatagagcacaggaaagttttagggcaatgaaactgctttgtatgatactgtaatgttggacacatgtcaaaacccacaggaagtacaacaccaagagttagccctaatgtaaactatgggctttaattaataatgatggctcatcagttgtaacatatgtgctacattaatgcaagatgtgaagaatatgggaaattgtgtgtgtgaggtggaggtggatgagacaaggtgatatatggggagttctattttcttctcaatttttctgtaaacttaaaatcactccaaaatataaaattaattaaagaaaaggtaaagggctttagaaacagcctgttttgttttaaccactggatttatttaaaaagtattatttatgtcttaatgcagaattcatccagttgtttctttgtgaagaagaatatacaattttgtttaaggaaaggacacctcctcccctctgactgcaaggaggtccggttgtgacattttggcattaacattcagcattcaagtgagtcactttggcaggccactcgacgtctccatgcccaggtttcatcatctgtaaaattaggatgataatgcctgaggatgcttaaaatcagaggcctgcagagggagaacaggggcgcctcaaggcccttgagcaatctcccaggatgagagacctcctagggggagctgcctgggcaaggcatctccctgctggctgtggcttcttctctgaaaaatggtcatgttgttctctccagccctggagctttgtaattcctattatggtacttagcttgggaaattgtctatgaatcaaaaacgcagcaaattggatatcaaccagatgcaagctagaaggccagtattcagttactaaaagtcaaaaggtagagggaaaagtccgggaagcaaataggataattaattttaatggtttatatttgatatttgttggctgtgttctaggacaattttttttcctcccaccttcctttacttcctctcataaacacttcccatgtccttccactcaaccacccttttatgttgcaggatatgtgtattatttactggatctccagtaaataatataaggtacggggagagatgaggtagtatatttagtatttcataactatgcattatgggagaaatgacctcttattaaacgaatgtattgcactagcttagagaaacaaatagaacatggcttcagggtctgtcctcaaaataggtctaggcaagctcccaagttcaagtgggaagtaacacttcccctaggatcatgttgctcaccttcaagtaggaataaattaaactctatgagataattgagttattatttcaaatattctctgaaaacaaaggtctgggagataaacttttgggagagcctgcttaaacgttgaactggcccctgcagtatgaatttgtcaggcatgggtagaggtcagagtgtgtgttttggcatagagatagaataaagtccctggcatgttgacaatgtgatgcccagctcaagtgagtgagctggcaggcgtcctaggctcacgctaggaactccacatagcttaggcctggatgacaaagggtaatttatgtcacgcaagaaaccaatgtctcatatgggagttctccaagatatttcctctggaacacaagttccaggcgacactcagtggaaatcaagggttccatggtcaaacgtatttgagaagtgattcttgctccttcattatagttgcatgacatctattagtgtataattctcagatgtcttgcagtaaaggaatctgcttaactttgttgaagctgaagctggcacttcccaagcacttgttatttgaaggtagtatatataccttttgtttgatgtaaatcatccatgattttctggactagtgaatttccctgaagtagcttttggggcacttctccacttcatggggccatctaaggtttggcaaagagagtcatgctcagacctctattttagagattctgttggcaggtggaggatgtactaggtgaaggacatgtatcaggatgccattataagaataaaaggcaatgacaacaaatcatgaggatgctgggtgtgttttcagcatcctaggccaggagttagcaaactatggcccatgggccaaatgtggttggccccccacctttttttgtaaataatgtttattggaacgcagccataccttttcttttatgtatcatctttgcactgaaactgcagagttggccagcaaagccaaaaatatttaccatttggctttttatagaaatatttgctgacccctgctccaggtagttggtggattgatttcggtcaggccagagtaagagaattatctgtgtttttcagttccagtttcttcaaacagatgaatgaaaaactatatatgcaaacaaaattgcaaatactaaattctaggaatcaattctgacttgaatttttaataaaagtgacagagactgggattgtcaatctgccttttcagctctgaacattgcagagaactgaagacctgttttcattcctggtaggctctgttatccctcttgtggcaggactcaggctgcaggggtatcgagaggccaccttgtcctgagttttgggcacttaagctatcaatcgttacctttggtctgaccctgggctgtgtcacgacccagtaggaatctggctgtagttcttggctcctctgtgctcagtttcctctaggcatgttgatactggcagatgctgtctgccctgtcccttggagagtaactttctacacatatttcttggggcacatgtatttatatatcattcataatgtaaagtcttgtgatgataaaatatgtgccctgaaaagtagagaggggccattcaaccccatcactcccagaagacagatttatatggtccaatcaagacctgggctgcctaacacccagaatgtgttttatttggtttttctatgtctcatccatatggctttaaaaaattcgaaaatgtagcgtttcaatggtgttagagtgtttgagagtctatatagtaaaaatttcaaaaaagaagaagaccttaagaatggttaatatttgtcactgcatttttggtagcaagtgttaaaaaattccatattttcagatagctgcacacaaaacataaaaatgtaatgtttcttagctgtgaaacatgccagtgaaaatgtttaccataatcatgagttgactgttgtttttatggaaggttaagtaccaagcaaagaattccacagcataccagataggtggtcataaatggagtgggcaggttggtgtggaacctgtcaagtgggttgaagacactgcatacctgactaggagctctgggtatcatgcccaggtcaaacaaagcaggctaggctggtgggctgtgtcccctaacattgccagcatgatctgtctggtttttgattctcattgcaaaggaagtatctaagaatgacgaattttaggcccagttcagcttctcaggttttgcttttgagcatatccactttagttttttcatttgaggatcagaaaataccatttactttgtgatttcatgatgggcagatacctgcattacaatcagcgacatcccatgatgtttgcaaaacttcattttttaaacagtgtgaggcacctattgcagctaaagaaagctttaaatttaaaaatgaggcagctgtagatgatttttaaagactaggcttgtggttgaccatgaactgacaggtttggtgaccttgggtggggtctgagcctcaggtttttgtctggtataatgggaatgatagtagctgccttaccagcctcctaggcttgcgaaagttatccagagagagagacaggagaggatctaagagatgcaagctagtttttgaagtgacaggcagctccttctctgaggaagactcatgaagtctggtggaattttatgcatgtgcgtgtgtgtctgtacatgcatacactttactcagcatgcagataggcctgtgtgggttatgaagactaaccatcaacatgagcgttaacagctcctgggagctgagagattatgatatgctcagcatttcccgtaactgatttctcatcttttcaacaacaccacaattagtaggcatggcacccaccataacaaatcaccacacatttagcaggataagatgatgccagtttattgtcatcatctctaggtcagaggtccaggcacagcagagctggttttcctgctcactgtctcacaaggcagaaatcaaagtgtcggcgaggacgaaggtcttgtttgaggctcagggtcttcttccaagctccttcaggttgttggcaggattcattctgttgaggtcataggactggggtccccattttcttgctggcttttggccaggattttgtctcagccctcagaggccgccttcaagtcctagtcatggggctctctcaccgtgtggcagggaatcaatggctcccatttctgcttatataacatcttatataatatcacctaattgaggggtcgctatcccatcatattcacgggccctgcccacactcccgggaggggagtgtgcagcacatattgaccagggccatggggatcttggctgaccctgtaagagaattctgcctaccatacatcctcattctgcatgtgggggaaaattcagagaggttgtatttctagtctagagtcacaaatccagtgccgacaaagcagggatttgattactaccagccttccaggcatggtgcactcccattttatagtatcagaagcattgagtgggcacagctgaacagcggtgtgtgtcaagccttgagtcaactgcagcagagaccagaactccccaaagtgtggaccatgtacaaatgtcagttcaggaactgttgatatcgcaatgagatgggaacagaaattgagtataagtgttaaatatttataagaatattacaatgtgcagccagacacggtggctcatgcctgtaatcccagcactttgggaggctgaggcaagtggatcatgaggtcaggagattgagaccatcctggtcaacatggtgaaacctcgtctctactaaaatacaaaaaattagccaggtgtggtggtgtgcgcctgtagtcccagctacttgggaggctgaggcagaggaattgcttgaacccaggaggcagagattgcagtgagccgagattgcgccactgcactccagcctagcgatagagcgagactccatctccaaatatatatatatgagaatgtgcaacatcaatcacttttgcattttatgaaagtattatactacagagtattggaaaacacacatacacgatcggacaaaacaaaacaaaaaaaccaaaagctggcccttaaccagttatagtgcaaggtgtcctgatgtcaagcagtttttcaatgccactgtcatcatatggggccccagttccttgcactctagagtgagtataggatcgacctggggaatattagaatattgtcacattggcctcctgggttaaaataatagctgaggtctttaataacttcttctggtcagttcatcttgcacattttttcttgctaggccaagcctgaaagcactccaatctaatttccccaggattttgggcaccctctgaatctgaatattcagaaacccccaatgagcatgcctgtgtcattgtttattgagtttatgaagaagctgtcttactggcctgccaagcagtcaaggttgcttttggcaaagtcgtctcaaggttctttgggtggcagatcaccaaaacccacagtaagcagcattatgacaatgaggattggatggtgaagtaacagaggtgcatgatggagtgaggttgggtccagggagtgaccaggatctgaggaagtagccctacccactggcttccttctcctcttagcatgctggctttctctgagcctctgtgcaccaccatcaccgatggctgcccttacttcagatatcccacagagactgatggacatctctaacctccaattctagatagagaagagtatctgaagagaccgactcggttagatgtccacttttgagaacatgattgattagaacattatggcgcctgagcccctgcaggtgggtttttagccagctctcagagagggtttggtatgcgctgggcagaccccagaatgtccattaaaccaaccgatgtgtagaggacacattaatattctctccatgtagggtgtgttgattagcttcctaaaaaataattagtaaagacttttttgacactttcgtagctcaaacattgcctgaaacatggccctgttttcattaagaccaaatatcaaaacaacagggacatacgattttatctttctgaaaaatctctcccttcggaatagaaagaccttgagcaatatctaattattcttgtgcctcttaatttgatagtttgaaaaatgttttgtaggctttaagaacatttatggaaatttcctgtccttgccacagatcaaattgtttaaatgatggacggcaattttatattgagctgtgataatagtatctcatttgctgctgcttaaatgatttcctttcctcttaacacatgtaggtcaagttactccttcagcctaaaaaaattgtgaacaaaaaaggatggcaaatggaagaaagccaattatacaacaattttagacttttgaagtaagaccgttgcatttcccatattgattacttttcacttgattatagtgactctcttcagctgtttattacaatatagaccataactcacagactgtacttgttccaaactaaatataagtgcaaagaagcggaaagaggaaggaggtgaatgaaaagtagcatttttgacatcaatgaataaccatcaagtaaataatcatatttagctttttgaagcgttgtatttgactaataacatattgaactcctcttgtcagagaaactcagatttcttagtatgtaccatctcatgcattctcattattttccatggtagattgaagacaaattttatgctctttctgtctgataggagataaatggggaaatgaaatggttggcagcaactgctgaggtttgtcatctgaaattggatagtaaaacttgtgtttcctcaaacctggctcaatttaccaattcactttgttgaaccattgacatgactcacaaattagaccttctgcttcaaatgaagtggggaccacttcaaacatcctgcagtcctctgtcatgtttgctgaatctttagtcaacagacaattcagtgacttctgggctcaagacgctccactctgtggcctagacaaacaagttctggacttcagagggcttctattccagcagataagatgtgtctataaacctctcaaactgaaggtagaaaatgtgtcatgacatgaggaatacacaagtaaagaagtcatgaggaggaagccattcaacaaatgtgtggaatgcgtgatggagatggggcaccactggctttttcctttcctccttccctttcttcttccctgcctctttctctcctacattcatcctattttcactgagtaatgactgtatgccaggggctgaagaaacccaggtggataatacaggctatctggccggtcacagtggctcatacctgtaatcccagcactttgggaggccaaggtgggcagatcacctgagattgggagtttgagaccagcctgaccaaaatggagaaaccctgtctctactaaaagtacaaaattagctgagcatggtggcacatgcctgtaatcccagctactcgggaggctgaggcaggagaatcacttgaacttgggaggcggaggttgcaatgagccaagatcatgccactgcactccagcctggtgacagagcgagactccatctcaaaataaataaaataaaataaaatacagcctatcctctcagagtttaccacagtaagagagggatgtaccatggaaagatgggaagatgcattcattgttgaacagacactgatggagcaccagtatgcctggattactcttctaagcccaaggtatccagggatagaaggagggaagggtctgttttgcagctgatgtttacaatataatacagatgcagcatctctctgagctcagtacagatttgtcaaatgttgcagtgcaagagatccagaaccccagagtaaggaggcatttttctgctttggagtgttcagcaaagttttcatggagcaggggatatttgattagggtgttgaaggaggagtaggagcttgccaggccaggatgaaatgagtctagtcagagacaccacatgtggaaaagacctgcatgcttattgttggtttgaataacatgcagtgttcaatgatgatggcatgggactaacttttcccattactctacacttcatctagaaaacttcttgaaatgaaagagaagttagggtttctttttgagaattaatatccccagggctagaaaatagtttgctctgaaacttggaaagcaaatgtaaaatacatttttcctctgatcagaaaatgtttaaacccattaggatgcaaagattaggagcttaaattggattcgcaggagatgtgccagctccacatatgtactagattatttttttgaaatgatgtaggcactgtgcccataaagtagagtagggtttctttatacaactgaaaaaccagcagagaaatctttgagaagggcctatgcatttcactttggaaatcactggcttaaatattcagtagacatggttcctgaattttgaaatcagtttttctttactttcctctttttcctcctttgcccagatgcctcttgatgagaaaaaggcagctgtttgcttaactccatgtatatttgcattatcccaaatgattctgcaataatggttaaaatttttagaaatggctacaatgctcataaagagaaaagcaaccttgaatgggaagggtgttccaaattcaaagcagagagcaaagaaaacaagggagactaagcaaacacattttgcacataaatgttgtggcgggaatccaggcacctgccaggtggaagttgttaggagtgataaagtgattattgacttcgaatctatccatcgttgccctctcacatttgataaactgccaagtctaattctcttagtaccagcttaccttttctaataattttctactcccaacagctgtccaatcatatttcttagagatttttttttaaactacaggattaaccaatatttctgtgtgctaaattttgttcactagactcacttgatcctccactaaggaagacttttcagttaaattacaaaaaggcagaccactcctgtgaatggcagttctgctcctagccccgttatgagtatagggatcctctggccatcggcacttaaatgtccctgtcttgtttcagatgccctccaccgtatgggatgagagaagaaagccggcatttagagaaaggaaaactgtagggtctagttctgaccacccattatttaatctcaagaagcagttgtcaaatgtccctagttcagagagagtgcagggctcatgaggaatgaaacccatcagagtggtaaaaacaccatgggggagttaaggcaagagagaagcacagccttacaggggcttgaacgacccctggccacaagctctgcccattaacttagtgcccagtagagctcatcccagatttttggtagtcctccttgccttctcacatgaacttattttaaactggggcaggaccttgccacaccatcatgttttcccagagttttttgggttatgttccttcctcctgcccctttggactttttaacactcgtttgctctttcttggcccctgaccaagaaacgttttctgccatccgcatggcctagagccttgcccaccttgaactctagtattttgtgtgtctgtcctgtgattcaccaccactgtctgcctgtggcttataatattagttatcagcaaagaaaaatgcgctgttggtggctttcattgagtagctgtaccttagcagctgtgacttattagagagcatagattaggtggtttgtcttaatgaagtattggtaaatgagagtaattatataaggaacaagattttattggaatacatagcttgttttgacttattttttaaaagagttattattttaatgcttatttaaaaccacatctgagttacctgtaacattcatcgtaccaagtactcctgtaatctcagcactttggaaggccgaggtgggaggatcgcttgagcccgggagttctagaccagcctaggcaatgtagggacttgtctctacaaaaacaaacaaacaaacaaaaccccaaaacaaatagtagttatttgattacctattcgtctcctttactattttgtgcagtcttcaaagggagatcttactagtctttgcttaataaataatggttgaacttctgagggagagaaagaaagagaaggggagaggggcagagagagagtgaaagagcaggagagtgagcacggaaaggaggagagagagtgagtgagcacagaacagagacagagagggagagaaaacccaggtaagtcactgatcttttctgcttcatgtaaacttgaatttccattatataactggcatatgtagtgtaatcagtttaataatcagcatacgtgtcctgctccaaggtaatatttgggggtagggttcttttttttttttttttttttttttttgaggcggagtctcactctgtcacccaggctgtagtgtagtggcacgatctcggctcactgcaagctccgcctcctgggttcacgccattctcctgcctcagcctcctgagtagctgggactataggcgcttgccaccatgcctggctaattttttgtatttttagtggagacggggtttcattgtgttagccaggatagtctctatctcctgaccttgtgatcctcccgcctcagcctcccaaagtgctgggattacaggtgtgagccactgcgtccggccggcagtagggttctcttatagctatccttcttgctatgttaattaccttgcttacaatccccccaaatagtgaaagcttaattaatagaattgaagtaataacaataagtatacatatatcagtgtctaagggatctgacaggtcaccaaaagagttgttgagtttcgtttgtttgtttcaggcttgagactttacaaaggagcattgtcctcttaaacaaacaaacaaacaaacaaaaaacttgtaaaataatttaatgacacaaaccttaaaaaaaaaaacagtggtatagagtagaactaagttcattttgctggtgggtgggattcgctttgacagtgacagggagccgtggtcgtgcaggcaagtcacctgcatgtgctcagtggtgtggacactgctttaagtgactgccggcgggcctgaggaaccggacaagtcagggccttgacttcgtcataatctctttcccattgtccagctgctgtccccactggaccccagcctctgaccaccctggatcacctttcctctgactcctcttttatttaggatgaatctcagcccttagactgatggtccaggctggtcccagctctcctctccacccttattttatttgctgcccagacaggtgtgccctccattccccaagggcgtgtcggcctttcccacctgggacatctgccttttttcttccgaacctgcatctgaaagttcattcagattctgtctcctctgtgaagtcttcctggcctcagtagtggcaagtcatcactttcttgttcaacccttatatccctataactcagacctcttatttgaagtctggcaaattgcattaggcatagttattatatttattattactagatgtgacaacaaattcctacagtgcagactgcgataagtaatttgtagctcccttcagtgtgtggccgtgtttcttccatatagtagatgcttaataaatattttctgactaattagcttcatgccccttaagattagatgttcttaattaaacttgtatcttcacgtagcatatgagcaatgggaaaatcatttttggaatgaggtgggctataaataaacagtaataaattattataagcctttcaaaatgttgttgcaaatctatgatctttttctccatttggtatttatttaccctagaagtgagaacccttttaattagcagtattcatattttagcttcggattgagctagaattctgctagatgccatcagacttacagttcttagatgccagtagttgaatattcacaatgtaacacgcttctaaggattttaaaaatatgtttaacttacttttatctcaataatatttatttagcgtttcttgttcacagttattgcaaatgacagtaattcatctagttaatctgaaatgggtcgttgtgctaaagacacataaaagatgcaattaagaatccaatccatatataaggaatgcttaaaggagatttcagtctctccacagatttgcctaatcccctggtgagcggatgagaacttttcttctgttcatgttgactggctgtcacagtggcacattctgtggaggtggattgtacccactaagttattggtggccaaggacttattgtacccattaaagaacaccaaacaacattgcactctaatatactagagacacttttttggtaacagttttattgaaatagtcacatagcatataatttttccatttagagtatataattcagtgggtttttttttgtatattcattcagctgtacaaccattaccacaatcagttttagaatatttttctcacccccgactccagaaaaaaaaaaaaaaaaacagtacactttaacatttttccttcaatctcagcattcctcccagccctaggcatccacaaatctttctgtttctatggatttgccttttttggacatttcatgtaaatgaaataatacaatacatggtcttttatgttctttgatttctttcactgagcctaccgttttcaagagtcatctgctacatctcaatattccttttattgctgaatgatattccattgtatggatacattccattttgttgatccattcatcagttcttggacatttgggttgtttccaccttttggctgtaatgattgatgctgctttgaacatttgtgtatatgtttttgtgtggacataggttctcattttccttgggtgtgtatctaggagtcgaattgctgggtcatatggtaactcttgtatttaaccttttgaatgactttccaaagtgaacataccattttacatttctaggaacactttactatgagaaaatagggtgatattttacataagtgggtttctacatttgaaaactgctatattaactcacatttctgaatgtcttccattgttacttttttctaacaacttcatcgagatataatttacatataatacaatttgcttattttaagtacataattcattgattttagtaaatttaccaaattatatatgattttagtaaatttaccaagttgttttatactgtggtcatggatgcacatcacatcgtgtgcattttcctctctccaatttccatcactcaagtaagatctctcctcccattgacatttatttgatctatttgtactcatttaactttgtgatttattagcccaagtagaagctgagccaaagggctcagaaaactttgtggtcatcaaacataaaatcaagaaacttctgtcactttattttttgttcaagtatcaggaggttcacactctgatatcttcaattttgaagtcaagaaatctccaaaagttgaaaggtttttaataacatgtttggtggaaaaacgtggcctgaactgacatgtggatatgtttaatatttatttgttctatttaatatgaataattatttgtctactatagaaatgttaatatttgattatggggtgctggcccagacctctctgtgtatgagttataacaaatatttatcattttacctttctaaaatccaaataatcctgacctagggtagcatgcctggccccaagggcctcagagatggctttgtgggcctggtttggttttcttagccagcgcctcagagtgaacaagccatcaactcctttggactgttaaagggaaacttaaaaacttaaaagccactaaagttcaaatatattttatgaattaacttcagctacgtggaattgctggtattcaactgtcttaactcacaaagtggcgtttttgttgggtttgccatttctctgtgtgtctttttcacagtgaaagaagagggtgggtggcagagaggggagcatggagtattgtgctggaagcaagactccactctggtcatgtcagagccttggagagttgccagagtccctgctgcaggatgtagggtgaggaggggaaaatacgagcaaaacattatgagcccctagaaccatgcacggggtacaggtgagcattgtatagataccagggaatttcagtttctactgtcagtttacttctgtgtaaaatgggtttagtccttcttcattagctctctgtcttttctttaaaaaaaaatcctcaaatcttttatcacttgcatatgttcatacatctgcttatttctttgttattttgaaataaagttataattagggttgacaaaggagaaagagttgaagctgagagagtcaagtgtatgaataacgttccataaaaattcaaaccctgtgtgtaatttcagttcattacctgggcattaaaaacgggagagccagcttatcctttaagctagcttctcatccttggaaatttaaaatgctaagtttggttccagagggtgaaaatgtcattccttgaattcgagaggaatgtgtgagaattagaatggaaaaataacaaaagtgaatttcaggcacatacatttcattcataacccaggcccttgtttgacccagccccctgggactcagaagttcacatgcgtcctatcatgccagtgctggttccctcactgccccatgtttcaagttggagcagtcatctcttgaaagtcttgggcaaagtttagagtcttggcctcaggattttatttctgcacctgggggaggaaggctttttctgaggaccctgaagccaccagtgtcgtattaatcgaaaccagggacttgtgtaaaatgttcagggaccagagtcagggcaatagtcttatttttcattatttgttcttgatttcatttggaataagcttcacatataagtgcatgtggttgactttcccttagagaagtaaataagcccgcttggtcttattacacagggtccttcagaagtcgagtgactcaggtcatttggattttgttttcaaggcccctggtatgttatgaatgaacaaatgagaaaacagttgaaaactgtggtatgttttaaatatatacatttcacaaattgctgctttttaagaaagcatgcctatattatatatgtaattggtctcttcctaagcaaattaaggatacagtagaaagaaattataatgcactgtaggctgtgtggtccaggaaagggatgcaactttaaacaacttctccttccagtgccatggtgtctttatgactgtatctgtaaccccttcaggaaataaggtggaaggtttaagtttaagcctcctttgaattggaggcttgctcaatggctttctgatccttggagaggatcctggagttgccttgagctgggtcttctgggagcttcccagggcagttcttattactaccttcattgctatgagcatgttttcatcttaaagccttctttcaccttgcattttcttcctgctgtggcccaaatcggtttctcaatataggaatctggatgttttatcccaaacttccatccctcccactttcacagctctctgcactttggcccctgctccttcctgtgctctgaagtggttcttacacaggtaccctgtggatcacccagtcgtgtttgatgagagaacaaaaaccctttaggttttattttttaaggaatatctttaggcgtttcaagtaggcaggggtttaataaagggaattaaaggcttatttgatagttagaaaaactgagggagtgagggtcagggaaactgctgtctgagttgacaaatctaggaagtgctgcggttgcaggaagccaccaccaacgatctccggtgtctgcagcacgagtgggtaattcgtgggagtgtgtctgaatgaccaaagatacctgccatctgcacatgcccacatacatgcccatcacttcagctggagaatattggtttcttctctttcagtttgcagacctctcaagaatctgacctggagccctgctcagggcgagggagtcaagagcatgtggtggtaggcctccagccctaccgtagaagacacagcttagatggtgctgagagtcagcaggcattctccaacacacactcttagtcacaagattgaatggacttcacttttaaaaacattctgtgcttgtattgcctggtcttactatgagattttatcatacctgctagcccttctttcgttcagtgttcctcctgagctcagctccttctctggttgttgctggacaccccctggaggcagtaccaggtagtgagtaagggcaccaagctataggttggtgaaaaagtaattacctttgcacccacctaatagttccatcactctgccttttcccttattctctgtatcctgttggcctccaagtcctgtatattcctcttcctaaataactttcagatgttttgtcttcaatctttctcgttattgtcttggatcaccttttgctcatttgagaacatctagataacatcaataatcaataatatttggtctccagcctcctttctcactagctccctgcccccgacacaggctcccctccacataatcttcatatgccaagccactcatgattgcctgaacatgtcatgccttcttttgccactgtacttgcagttccctcatcctggaaggcccttcctttgttttctgggctggctcttgtctttcaggtctcagtgtagatgagaaggcttcttgtaccatacgtgaggagcctccttgtaccccgtaagcctggtctagttgctcccttggtggtatgtaggattccttgcttagctcctgttagagcctttatcatgttgtgttgcagttgtctactggtttctttcccatcctggactctaatgtccttgaagacaacagctgtgtcttataaaccttatattcccagatgaacacagtgcctggcacccagtagggtgagtaatagatattttttaatttgtccaactgcattttgagcactagccatattctcagtgctgctttgagcacaaagtgctcagtcctttgttagggggtggggtgggggtgacatccttgaggaggagtcatttgagctgcagagtgaccaatgaggggcagtcaaacatacaaggatctgggacaagaatatccttggtcaagagaacagcaggatgacagagacaagttggtagtggtctggggccagaaagatggctgggggtcaggatctgagggtactgggccagatcaaaggaccttttgggtcatagtcatgattagtgggaagtcactggtgggtttcaaacagggagtgctgccatcagaattgttcttaaaaggctttttctggcaaccatgtgagattgccagaaaaagaatgggatccagggcactgagtgccaactggacacttgttaggatgctgagggtttccagagaagagatggccgtggctttgctagggatataacaggggagagggtgacaaaagtagtgaaacatggggtgtattttggagggagagcccacaggaattgctcatggattaaggtatttgtggaataaatgtcattaaagcaagtggtctctctgcctcagtctctgttccaggtttatcctttttaatttttttcagcactgccaccagattacttttaaaggtgaattaaagttcaggtctgatcacgtgggtcttatggcccatgagacctcccgctgcacacaggccacagtactccttagcctagctcaacacccttgcctatctgagtcccacttgcctgcccttttgcactcttcccccttcccattccacacctgcagctctgcagacaggagagactaggcagagggaggctcccaccctggagcctttgctgctccttcgccgtcacctctctcagtcacctggctaacttccactcctttaaccccagcttactgttgcatcatttatgagcattcctgcactggtgctctatgcccttcgctttcatagtgctataacctctcttccctttggtttccctttggtgtaaagttaggatggtatctgtgctttgttttatagagcagttgtgaggatttgctggattcaatgactaaagcacttaggacagcttggcacataggtcaggcagtgtgaagctcaataattgctgttatcatcttgtgtggccctcctattgtagcccacgccacattatctagttatttgcctcttctcccaactgaactgtgtgagagtgccgttatcttcattgcgtcagcccttagtgtaattcttcccacataattaatcatcatcatcagcagcagcagcaagataacattagtggacatttactcaatgccaagaacattggctcagagaggtattataaagttgctggagtcaggatttgaattcaggttgttggacctcggggctgttccctggaccaacacgatatattccttcccaaactgaagttgcctggtaaacatttggttggatagttggaaggaaagaacaacaagggaattggaacagatttttctctgcatcaaatttatataaaaatccatcttgagaaggtaaagtctgaaaggacatggaaattgttagtgttatttcattttcgaggagaaagaaaaattttcttccctggccatagttggggcctgggggcaaggagctgcctgccacactcaccatcctgtccagtgtctcacaggtgccatctgtcacaggagcttgctttggcaaacagcttaatttctgtgtttgtgccattctgaggacatcagtcaaacccttccataaaggcctttgcctcattccgttttcagcctcactgatcacagattttacctctggaactgaaagagtggtggattctgaaaacccgcccttaaggagcagatgcacagccttgtgtttttgaacacaagatttggagtccttttcttggcagcagaattaactttcacataacctccatgtaactgtgaacttggggagttgttccaagttctccctatatgagagccaaccgtgggaggcagtgattctgggaagtttccttgtttcaatcaagctgttttatgctggaaaatcttgtctcttcctctaccctgtcttaataatattttacacttgtgtggaatcctttgggaaatttttgtatgtatattctcaccagattcacacactgaggtacagactaaaggttttattatttgtgttcatcagattagaaaaccaggactcagagaagttaagacttgcccagagtcagtgagtaggaagacctggattcaaactcttgtctttgatttctgagacctgttctgactctactgtaacaaaatgtaccccaaacttcttgaggcctaagactcagttatctatttattggggttcagtttttggtgatgttcttgttacctaataggttctcaacaagtacttgctaaactaaacagaagtgacagaaaagtgatacaaccaggaatggaaactctctgcaggacagacttccttaccagtaccaacaccttgttatgttgactgtgacttatctggggcagatgtccctgtcttccttggctagttgggcaataccttcaatactctgccatggtgagttctagtcaacaccttctgagtaagccctggaaacgtataattaagggctggaacagaattttattcaccacaatcagaggccttggtgataggaaatttcctttcattttggagaacaaatggtcatccttcaggtcagcggtccccaacctttttggcatcagggatcggtttcatgaaagacagtttttgcatgggggagtgagggatagctttgggatgaggctgttccacctcagataatcaggcattagttagattctcttaaggagcgtgcagcctggatcccttgcatgcgcagttcacaatagagttcatgctcctatgagaatctaatgctgatgatctcacaggaggctgagctcaggcagtgatgctcgcaggccctccactcacctcctgctgtgcagcccagttcctaacaggccaccgaccagtactggtccatgctgggggttggggactcatgcctcagatgatgtaatgtcatagtccccattcattgtggactatccccttgggaagttaaagatagttccattgcccacaaaagaaatagtgcagttacctcagaactgaagggtcctgcggggactttttaagtttcatggttaaatagccttgattttgataatcaactctaaaacattcccaggagagctatgtaagcagaagaacatcatttaaaatacttggtcatttggaaaaattacttgggctcaaatcgaaggttgtctcttcttcatacctctccctgagctgccttggtccttgggcagccctttgaacaaagtttggctgtttccatcttcagcagctttgcaaatgttgcactttggcaaatgcaggcttagatgtagaatgcgatggctttggtttgcaaattggccattcacactgataacgggtattaatttaatcagcctcaaattgataacaggtatctcttgtggaaacaaagataatttgttattgattgtgatcatgtcttctgatgtaaactctaggcttattttgtcttgtaaaaggccagtgtagccttatacaatctgaaggagataggaaaggggaggagtgaaggaagggaagaaagctccccacatacatgcacgatgtgttttctctattgttctgttacctgctttctctagaaactttatagattagcttttataatccactttgaaatgtttgccatttttaaagcagaagcaatttttgcagctttcaggcagaaggtcattttatacgaaatgttcattcatgtgcaacaaagcttatttcttctacaggaacaaagaaataatgaaggctccttaaaagctgtgtttctccaaagaaatgatcaccttgatagttggtgatttatatgtgccatttctattggaatcgaaaagtaaaaaacatttgtatcaataaggattactgaatattattaaggtttcagctatgactctaactgcagttgcagcattgcagggtggcagggaaaggtgtgttggctttcttcttgtctaattgtgtccatttctgcaggttattcatttcgccttggtttattatctgatggtcatccagtcattgttgtggcctctgtgtaggtcccagagcactagctgtttccagaatatttctcttaattgctgtttccagaacattttcttacctccaaaactttgtgtgaaatgttcctgttggctggaacgttctttcagcacttctctttctcctgcatccttcctgttctccttcagagctcagcttaaatgtcatgtcttctgggaagcttccttggcttcctgacagcattctttgtcacttgtcccttctcattgaaatagctattttccttgtgtgtccctcactattctgtaaaccatcttacgtttttttcatggatcactggtggtacctctccgatactttgggaaatactcgtctaattgctctagctacaaagcagcaaagattaatctacactgttaacggagtgataaacaactctatcccaaggacagaggggaaggaatctcaacaccagaaggaatgaaaatgtaaatctgaacaacttactttatttctccaatgtaacagttcttaaatggatgatttctgacccttggtacaagacaagagtttgaaataagtacgggaaacaaatcaatctcattttgcctgggttcctggaaacatcttttgatgtgctcagtgcccttaatgagggtagagatttttcattttaatccgtgatggattgagtttgaaatttgtgactgcagagaggacttagatctcctctgtcttcacttctgtagactgtcagcatgtcaagttcaagccctgctgtgtaacacgctgctaggatcgcattagtcccaggtacacactgatggacaaatggtgtaactccaactcttgcccttaaaacaaaagccagccgggtgcggtggctcacatctgtgatcccagcactttgggaggccgaggcaggcggatcacgaggtcaggagatggagaccatcctggctaacacagtgaaatcctgtctctactaaaaatacaaaaaattagccaggcatggtagcgggcacctgtagtcccagccactcgggaggccgaggcaggagaatggtgtgaacccgggaggggagcttgcagtgagccgagatcacctgggcaatagagtgagactccgtctcaaaaacaaaaaacaaaaaaacaaaaaaacaaaagccactgaatctagggtaacagttcaaccatgccgctctgggtatggttgtgatagtaattactactatttcttaattcctctgtttggccatttttctacacattgaactcttgttgattcaaaggaaaagtcatgtgatctctaactctggtattaatgacaattcaataactaactccaagttaacccttcgtgtagcccaaatccatgttcatgattatggatttgagttccccccatttgagcttaaaccttatttgagaaagaattatgtattcattccagaaaaaaaggcaataaaaagcctggtatgagtattaaatgtgttgttgcaaaacattacatgaaaaccactaaatatattaagtgctttgaaatctttattaaattccaacaccccattttaacagtattttacaacccaaaggtttttagctttagcataagaaataaaaataactttttacattgctcttccttatggtttttatatttctgttttgttttgaggattttcatccataattgtccctaccgcccattttagggatttttatttgaaattttctttatttgtacacaatttgttcattgtgataaaatcaggagtccagcaattaagttacgttggtagtgtagtaacattttccattaccttcccgcctctcaccgcacaattctttctctcttttctccccttgttaagccaaaatggccaggaacaaaaacataaaatacatgaagacaaaaaaatcattttctttttctgatccaatttttacttagacgtggtgtccggttttccgcttctggcccatgacggaaagtttgacctctaccatgtctttaacgctagtcctgatttaagtgtcgcggggaggaaacgggacactgtgcattctgtaatgttgtgcggatatacatagggtcattgtaacaagaaataagatgtgattttaaatgaaatgctttaatatccccgctattccccttggcagcttcgccttcaccaaagctgtaaatactatccatggtctatggcttctagcattgtctatttatacaaatggctcttgtttgtatttatttcactaaaagggatgagttatatagaaatataaaaagccagtgaaatgtgcatcaactcatgaattacaaccttttagcttataggtgcttttttccaagtcgagcatgtgtattccagtatattgttatcatttttattgagtaaggaaaagctttggcattaaacaagggataaaagatttgtggacaaaactgctgttttctcttacctcacagctcagttccataggctggagtcttcaaagccatttttgtttccagtgttcacgtttaattaaaaaccacattcacaattctataatcccatctgttgacctaaaaaaggaattcatataaaagaaaattaacattattattaaaagtacactgcctttataataggtataatagagtaacagttttccccaggctcagtggcagtttcttatataataactaaaatattagcaaatttaatggatttttcttacctgcagatttgttttaaaaacgtatttcattggacttagatgattataatgacatttgctaagaaaagagatgtcaataataggctgttactttctattggcaagcatcagaatttgaagttctatggtcttgactttgttagatgatgaatcagtgtattttaattttattaactggagaaacttggccaggtgcagtgactcacgcctgtaatcccagcactttgggaggcccaggtgggcagatcacctgaggtcaggagttcgagaccagcctagccaacatggtgaaaccccatctctgctaaaaaatacaaaaattagccgggagtgatggcgcatgcctgtaatcccagctactcaggaggctgaggcaggagaatagcttgaacccaggaggcggagcttgcagtgagccgagatcacgccattgcactccaacctgggtgacagagcgagactccgtctcaaaaacaaaacaaagcaaagcaaaacaaaacacagtagaaacttctgtccccatgactcagctttttttatttttattttttgagatagggtcttgttctgttgcccaggctggagtgcagtagtataatcttggctcactgcagcctctgcctcccaggctcaagtgatcctcccacctgagtttcaccgctagctgggactacaggtgggtgccaccacgcctggctaatttttgtattttttgtagagatggggatttgccatgttgcccaggctgattttgaagtcctgggctcatacgatccgccccccttggcctcccaaagtgctgggattataccacacccagcctgttttaggtaaatctatgggagatggttttcttcttaaataacatttcttttaatttgtttacctttataagagtactttcagaggaaagattactgtcctttgttctttccacaagacacatatttcttgatgatgtgccatttttcatgactgtcgtacacagcagctgagcctgttttgggagggcatcttctgagttctctcagaaaatgtaggcctgtctcctattggcatcagagggcaggttgggacaacccggtgggtgctgcatgcagggcgtatccattcaaagagctcccttctgggatacctatttgcttcataagaaacaaccattacttgtagctgctggttgattgtcatttcttgaatcatgtttcctaaagctttctagtgagaatgatggaaaaaatatcttcatggatggagaaggaaatatgtggggtaaattaagtttaaaaaaagacatgcagtgcttgcttcggcagcacatgtactaaaatgagagcaatccagagattagcaaggatgacacgcaaattcgcggagttccctattagaaaaaaaaaaggcaggaggcaaatttaacttgaacgtgaacataaaaacttgctagcaggtcaaattctcatgtatttacttcactcagcacagaatgcagtgttctggctgctcttagtagttaatacaatattatcagatgctttccagtgtttaccttcttgtgttgttacctactttgtattgcagtgtttatggttgaaatatactttatgttttgttatataggaatatgttacatagtttgcatgactgtacagtatacatatatatacatatacatacacacatatgtaaataaaatatatatgaaatacatttcatggatactgtttcatggtgatttcaacttgcctattattttcatcctgttctcttttttgttggtcctacatgactttattattattttttcctttccaattctttactttttttcagtattatctgtcttggtaattgtgtagttttactttatcttttgatcatttaaacattttatcaactttttttctctagattctcagtgcgtagacaccatcaaaaatccattttttatgtgttgcagtaaataaatgctcaaatgcatgacttgttttgataatgtaagtattcagacatgcataatatttaatacacattctgtaaagctcaatatgtaactgatttcatgatacatgcacagaaattctaaatctgttacaaagattaagagaatatgctctcagaaacacatagttttctttctttttatatatcactgcctgtcactcatctgtcaggatccacagtgtgtttgcagattgtaccacatgatcccagaaggctttcaagcttcattgactaggatgattttaggaagagagtgacccaatgaacgcttggggcccacttacctgatctttgtagattgttcctcttcttacttttctgtttctcatcccctccatcttatgtcttttttttctgtaaagaattttatgtcttaaagtgacagtattttaggtaggaatacataagttttgtgttttgtttttgagacagagtctcactctgtcgcccaggctggaatgcagtggtgtgatctcggctcactgcagcctctgcctcctgggttcaagtgattctcctgcctcagcctcctgaatagctgagactacaggcatgtgccaccacgcctggctaatttttgtgttttttgttgagatggggtttttgccacgttgaccaggctggtctctaattccttacctcaggtgatctgcccgcctctgcctcccaaagtgctaggattactagtgtgaacccaccatgcctggcctaggtacatggattttacaaagttaaataagagttgagaaaccttggaggtttaatcaagcatcaggagtgaggtgaggaatgggatgaatggtatttttagccagtggttctcaaactttagtggcatcagaattacctgcagggcttgttagaccagattgctggtcctcacctccagaacttttgattcggtgggactgggatgggcatttctacaatttcccaggtgaaactgatcctgccagtgtgggtctgcactttgggaagcactgctctagggtcaccactttttgtattttcaggtgaggaagctgaggctcagacaggggaagggtcctgcgcaagatttcacacctgtagtgagttagcatccgggctagaatgaggaccaggtctcctggctctggcctctgatgttctctggggattgttctttgaccagtgaaggaaaaaacccttcctgaccttctgatcaactgaagatagtctgggaaatcacatttccacccttcccaaatctctgtctgtgggcagcactgtctctggctggcctgtctctttctttgtatgtcctgtggcgaaagtgggctttggtactctactgctgcttaaagttacccgaatgtatttcagcctcttcacttccatatccagtttaataattattcatgggacatttgtccatcaatttgtgaccgtttagagattaatattaatgccatcatttttcacacgtggcctattaaactcaggcctatattatgtcaagaaaaagcaagttaaagacagcataggatacaagagtgaccacaggagaaatagaagtggtcaaatttttgcttggatctaagattttgcttttagtttgatataatttcagtgaaatattatttcaccaaatgagagttttctgtaatatcctctagcctatattttcaaggtgggaaatatcttattgtaggcaaaatcaaattaaagtaaaaatgattttgattgttgactaattatctaaatgaaggcattatgaaatgggtttcataagaatattaatgtgttgaatttcgctggctgagaagaataacaagaattgtgttgttgtgggtcctgagtattagtttaatttaagtgattgctttattgggttgcagattgtcacagtggcattgatggaccataaaatgcaaataactgtcacctgataattacatattagaactgggtacagaaagaattgaccttgaatgattgagggaattaaaataagtactcttttccaaaatattggggaagaaagctagcccacttaaagttggactcaattcaaggcaataaatcttgactaagggcgttctatacctaaggaatgcactatgctaggtgggttttggatctgcattgggcctcaaggaccagtgtctgaattgttaggtaaatggatgcagaacacgtgtgcatttataaatgtgtacataacaataaatatttattggaagaattattgattgaatgatggaggcagaaacccagtgttgacactgatgtgattattttcagtttcatgggagcaaaggcatcagatcacaatgtatgaaccacgatataatatgtcacttttggtcaatggagaaatggggttcaggccacaattctgatccttaatgctgtcttctgttttttttttttttttttagcgtctggtggaggctgcagaagaagcacacctgaaacatgaatttgatgcagacttacaggtaactgattatagtttgagttaaattgttttgtgtgtttcctgccaaaggacaagtaccaggtataccaggaatactgatttttcagtgattgggagggagaggcttttgagaggatggtactgagttggaatctttgacaggattcttaagcaatccgcaaccaccttctaacagtgacagttataatgggtgatgtcaaacactcacatgtgtgtaatcagatttcaataaactattccccaatttagggggagttaaatcggtcaactgacaataatcaccagatctctcaatggtgaattgataagatagcagaatacatccaaatcccacttggctggctgcattttggaatgcaagtgactgaaagcaatactgtgatggatctatccttgaattgattgttaataacatttaaaaattgaatcattcactgatttgagattcaaatatccatttcattaatttcttgcagtagatcttgtacctgatcctgacatgactatgtctgatagagaaggattttgatgtcgatgtgtatagaaaacatagtaaagggcaacaagttaattaaataatacttggaggttccagctgggtgtggtggctcatgcctgtaatcctagcactttgggagactgaggcaggtgcatcgcttgaggccaggagttcgagaccagcctggccaacatggtgaaaccccgtctctactaaaaatacaaaaattagctgggcgtggtagcgcacgcctgtaatcccagctacttgggaaactgaggcaggagaattgcttgaacctgggcagcagacgttgcagtgagctgagattgagccattgcactgcagcctgggtgacagagtgagagtctgtctcaaataaataagtaagtaagtaagtaagtaagtaaaacttggagattcctttgggtctccctgaaagaacttttatctaaattggcactttgagttttgtgacctttcctcaccactaggaaaacagaaggagcaaatcttaaagtttgagctttgctagacatatttcttttagtggcatgtggtcacaatttggaaatagtgttgactttcctatattcccatttatatggggaatagaaaggcagacataaatcattaagcacaaaaaaagatggcagtaccaaagctgaccaccggctgcatgtctctctggaagatgtgtccttgtcatcaccctcatctgtgtcttttgctttgtgggtacaacaatgcatattcaagtggggtgatcaaggaaagtttaattaaggaaatattttcaaatgtatactcggggttaagtgaaaccaacatgcagtggtgttcagatagaccaaaaggcaatggtggcataccccagagctggccatacttatgacctgaagagaggaaaactagggtttccagaactcagggaagatggctacatggaaaaaggatttgatagaggagtatagacacccatggtgagctggaaagggtgaaatttgggataatgatacccaagtactctcttgctttcttatttcttgccagtactcaccgttggctgaatccagctgttggtatggttgatgcagttcagttcagtcattgagctgggtgaggaaggttgaagaatggttctggaggggcaaacaaaaaatatcaagtccatcatcagcagtctttttaggcataatactcaacatttgaaacaaatagagccagaggtatagctaagcataagaggggaatgaggagaagctctgaggatggttggaaacattggaagaggagtcggcagctggcccagctctttgagcgaagctgctgagaagggacagaagatagtgagaagaaccttggatatagcaagaagtaccttaccttcctaaagccatactcagttctcacaaagatctaggggccatttactggccacatttgtcttctttgagcctgattgtcagagaatttggacttgtagagtgggccagaagggatttaatggcagcatcaggaagcactttggcaggtgtgaagattataaggacctcttgagtgcaatgcccagggaaactgtgtcacttttctcagaagttcctgaaggcttttcaggaatattctgattttaagtgacagaaactcaactcatatcaacttagcttgtaacaatgaataaaataagaatccatgagtccgcttgataataaataaacagatagatagattaaaaaatagacaaatgggccaggctgggtggctcacacctgtagtcccagcacgttgggaggccaaggcgggtgtatcaggagtttgagaccagcttggccaacatggtgaaaccctgtctctactaaaaatacaaaaattagccgggcatggtggcaggtgccggtaatcccagctactcagtaggctgagacaggagaatcgcttgaagctgggaggtggatgttggagtcagccgagatcacgccagtgcactccagcctgggcaacaaagagcgaaactccgtcttaaaaaaaaaaaaagacaaatgagggggaatgtcttagaaggcaactaatgcatatagaaaaatgattgagttagaaaattatggtaattaactgaggcaagaatcttcagtggatgctaaaattagttggcaaaagtttggtgaagaacaggacacttatagtctcaaactatttgcccacaagttactcatcaattacaaagggaaaaatagcaattttattgtggagaaacctgatagacaccaccttaaacaaataatcgaagttaatgtcaccaataatgagacaaagtgacatcaagtgcctccagatgtgatgactcagaaaaatataacacagttatgtagaattcttgcccaaaatgtgtagcctgactgtaatcatgataaaacatcagacaaatctagactgaggaacattctacagagtaactgtctggactcgtcttcaaaaatgccaagatcaagaaggagaaagaaatgttgaggatttgctcctaattcaaagagatgaggacacatgactactacatgcaatgtgtgatcctgaactggatcctgaactagaaaacaaagttttaatatggactgtgcattagaaaacaatgctgtattaatgttggattgttggatcttcatccctatactgtgattatgttaaggaatgtcctcattctttgattttttctggcttcattggttcaacaggaaggagtgattgtgcgggagagagtgagaaacattattggaagtgatgactgctttgtaaaatctgttatttatggctcatgtggtcagttttactgagagacaagggttggtgggatggggcatgggaggggatgatgtggttgacttttggggattacttatccttcagcagatgaaaaatgttttgtggttttagttcagccaacatagagacattcttttttgtccatctgaagctattattattttccaagagtgttctgatttcctatttccgaagttttacagtaaaattctggtgtagcacaagcaattccctctgtcaaagagggtgctgtgattgtgaatgcagcattggcatctctcttgaaaaaatgaggcaccaagaaaataagtctctagtttttgttctcttgggaacaaggaaagggagctaaagttttcctccccagtcacctgttctggacatgtacaacaaaagcatcagagggtaccattgtggtctgaacataagagtagatgttgaaatactctgtcaatatgacaatgccattcacactggtgctccgacctcagtgaactcctctatgggtcaaagtaaaccacatgcactttggtggagacctgtgaaagagaggcctttgataaactggctgtgcatggaaggatttgtcttggcttagatgaaggttttgaagctactgaagcttctatgctattaagtgcaagtatattaacagcttgggtgtcagccccattgctattactgaggtggcaggtctgtgtactggctctgaatttattactatgatggtccgttagagctgatcaattgttaatctgggttctgctgacctctcagcaacccctggcagataattgtttttatcaaaaaaatttcagactaccatctgctcactgtgaaataacgctgagaaggaacctaccctattagctcaggaggagtacagggagctggaagtctgttttcatactgaaaaataaaaagtgattttgcaaaatttcctaacctgtgtagttttaactcatatatatcttagcttccgtcttcccaaaacagaaaagagatgatggatctgccccttctctcgctttagactggagacgttgcatcattgcaacattcatgtgcttcaaagtgaagaatttgcttttcgttggtaaaataatcaaaagttagaaaaagaaagttacaactcctttattattacaattttattttccatttaaattccccttgccatcttttcagaggtttaacttttccccgtgaccttatggcttggacatctacagccccctctgtaatgtccttactatggcattagattgttagttgttaacaaaaactgtattggggcaagaggcaaaatgcagctcctgaaggatagcatgtgtgaacaaaccaaaatgcagaatcctccatagaaaacagatgtgcttggccttcattggcggggtggctttctttctttctttctttctttcttttttttttttgagacagagtcttgatctgtcacccagaccggagtgcagtggtgcgatctcagctcactataacctgcgcctcccagcttcaagtgattctcatgcctcagcttccccagtagctgggattacaggtgtgcaccatgacacccagctacttcttgtattttttgtggataccgggtttcaccatgttggttaggctgttctcgagctcctgggctcaagtgacctgcctgacttggcctcccaaagtgctgggattataggtatgagccaccatgcccagcctggcagggtaactttcttgtggacactggtgtcagttcagccctctggcttgtccctctttctggtggcctgtgggttctagattggccttctcttggtgtagttctttattccctgatatcttcattgggtcaattttcagtcataattgacaatagaggccttattataatagcatctctctccttttttactttatgctgcgaattaacataggcttttcttaaaagattgatagttccaatgagaacagagttttaaaaaatactaccctatgtctcagttattacatgtaattattttagtgtttcatcctcattattttgatggcaaaacccaattccaggtggagaagcaggagaccctagctttgaatacctagccattgatgaatttccagaaaattaagtctatacatgttctagtacaattcagaatgcgttccccctcttacatactctttctttttgagtttttccactggcagtaaagaagaaaaaaaaaatgtccttttgacagtttactaaaaacctgcttatctttgaaccacaaacatattttctttgaaagctgtctcaaataagtgccagttgcacagagcgggtgcacagagagagaaaaaaatatggttttgaattgtgtatcctgcagaagctttttctattacaaagttttctatgatagtttttctttgttgttttgtaagtaatagggaaaaagagaagtgtggtgacattcagagggataacaggtatggaagggaaaggagctggcagcacacttcctcctggtcctcaccaagctggaagagcctaccttgcaaatgtagtggcctgatttcaaaggtggggtgggggctttggagtggagggggaataaagactgttggtgggaaacctctgagataagatgacttccgatacttcctagagcagcttactctacctgcttacctgttacaatgggagctttgtgttgaaggaaacccaggaaaggagagaaagggcagctcaggagccccagcactcagtgtagaacttctttcaccatccactaggaaaaggaagcctttctaggaaaaaggattagcaaggacagtgggagagtgatgtcaacaagatggctggctagaagaagcccttagtgcttgtcccccgccaccctgcaaagacagccaaagcaaagaataaactgctggattttgatgaaaataactaaacagggctgaagtgcatcaaaggagtaacagaagccctgtagaccacagaagctcaggatggacgcatagagaagggaagcgccttgcttctgctaccccatccccaaggtggggtcagttcaaaaccaggagttacttctccctgtggaaaaaaggtgagcaagaagactgccggaagcacccatcgtcgacgtggagacttgtagtgctctccactggggactcctaccgacctcacaggtgctcaggtcagctgagggagctggctggtgtccacacagctgcactttccccagagaagcagctgacactgtgtcctgtcccctgtgacccatgtgggtactgcaccgtctttgaacttgaaccactgctggagtgtgtgtctggctctggtgcagttagccacagcaccctgtcgtccctgaggctttgttgccactgaaccacccttgcctgctggcccaccatccctaagctgagctgctgctacatgctaccccaggggccaagctggtgtgtagctgctctacctacccctcccagtcactatcgtgcttcgcccctcagagcttaagcagaagcagcaccctgcatcctggggaattggtgccttgtctgcccagagcagtaaggcttcctgtgcctgagctaaagaggtacatcaactcgtggggaaatggagccatagccagactgagcagccacacatccctgggctgatctgacgtggtatcccacgtcccagggaaacagggcgttggttgagctgggacaccttgccctactggctgaagaactgtagtaccctgcttccctagaactggactgtccttgcagagtatgagacacccgtcttcttggggagtggggtcatcactgtgctgttccctgccttccaggatgcaagcagcagctaggctttgccattttgggtaccttgttgctgctgcatgtgtccatacagggtctaggatgcttctgtgtctcaccatctgggggtccagagttaccactatgaggtaggcatctcattcactggggcctgaattgccactgtgcctgttggcactggttcccaaattgcagctttaccttgctccctgggctcaaatcgtcagagcaccccttcttcctcagagaaaggccagttctgtgtcctgtcccctggggtcagagttacaactacaacccagctccccggagcggccttagctgcttggttgtgccccagaatcacagatcctggtgtgtaggcaatctgcctgcaaccctgccttggagagtgaacattttttttttttttattattatactctaagttttagggtacatgtgcacattgtgcaggttacatatgtatacatgtgccatgctggtgcgctgcacccactaacgtgtcatctagcattaggtatatctcccaatgctatccctcctccctcccccgaccccaccacagtccccagagtgtgatattccccttcctgtgtccatgtgatctcattgttcaattcccacctatgagtgagaatatgcggtgtttggttttttgttcttgcgatagtttactgagaatgatggtttccatccatgtccctacaaaggacatgaactcatcattttttatggctgtatagtattccatggtgtatatgtgccacattttcttaatccagtctatcattgttggacatttgggttggttccaagtctttgctattgtgaatagtgccgcaataaacatacgtgtgcatgtgtctttatagcagcaagatttatagtcctttgggtatatacccagtaatgggatggctgggtcaaatggtatttctagttctagatccctgaggaatcgccacactgacttccacaatggttgaactagtttacagtcccaccaacagtgtaaaagtgttcctatttctccacatcctctccagcacctgttgtttcctgactttttaatgattgccattctaactggtgtgagatgatatctcatagtggttttgatttgcatttctctgatggccagtgatgatgagcatttcttcatgtgttttttggctgcataaatgtcttcttttgagaagtgtctgttcatgtccttcacccactttttgatggggttgtttgtttttttcttgtaaatttgtttgagttcattgtagattctggatattagccctttgtcagatgagtaggttgcgaaaattttctcccatgttgtaggttgcctgttcactctgatggtagtttcttttgctgtgcagaagctctttagtttaattagatcccatttgtcaattttggcttttgttgccattgcttttggtgttttggacatgaagtccttgcccacgcctatgtcctgaatggtaatgcctaggttttcttctagggtttttatggttttaggtctaacgtttaaatctttaatccatcttgaattgatttttgtataaggtgtaaggaagggatccagtttcagctttctacatatggctagccagttttcccagcaccatttattaaatagggaatcctttccccattgcttgtttttctcaggtttgtcaaagatcagatagttgtagatatgcggcattatttctgagggctctgttctgttccattgatctatatctctgttttggtaccagtaccatgctgttttggttactgtagccttgtagtatagtttgaagtcaggtagtgtgatgcctccaactttgttgttttggcttaggattgacttggcgatgcgggttcttttttggttccatatgaactttaaagtagttttttccaattctgtgaagaaagtcattggtagcttgatggggatggcattgaatctgtaaattaccttgggcagtatggccattttcacgatattgattcttcctacccatgagcatggaatgttcttccatttgtttgtgtcctcttttatttcattgagcagtggtttgtagttctccttgaagaggtccttcacatcccttgtaagttggattcctaggtattttattctctttgaagcaattgtgaatgggagttcacccatgatttgactctctgtttgtctgttgttggtgtataagaatgcttgtgatttttgtacattgattttgtatcctgagactttgctgaagttgcttatcagcttaaggagattttgggctgagacgatggggttttctagataaacaatcatgtcgtctgcaaacagggacaatttgacttcctcttttcctaattgaataccctttatttccttctcctgcctgattgccctggccagaacttccaacactatgttgaataggagcggtgagagagggcatccctgtcttgtgccagttttcaaagggaatgcttccagtttttgcccattcagtatgatattggctgtgggtttgtcatagatagctcttattattttgaaatacgtcccatcaatacctaatttattgagagtttttagcatgaagggttgttgaattttgtcaaaggctttttctgcatctattgagataatcatgtggtttttgtctttggctctgtttatatgctggattacatttattgatttgcatatattgaaccagccttgcatcccagggatgaagcccacttgatcatggtggataagcttttggatgtgctgctggattcgttttgccagtattttattgaggatttttgcatcaatgttcatcaaggatattggtctaaaattctcttttttggttgtgtctctgcccggctttggtatcagaatgatgctggcctcataaaatgagttagggaggattccctctttttctattgattggaatagtttcagaaggaatggtaccagttcctccttgtacctctggtagaattcggctgtgaatccatctggtcctggactctttttggttggtaaactattgattattgccacaatttcagatcctgttattggtctattcagagattcaacttcttcctggtttagtcttgggagagtgtatgtgtcgaggaatgtatccatttcttctagattttctagtttatttgcgtagaggtgtttgtagtattctctgatggtagtttgtatttctgtgggatcggtggtgatatcccctttatcattttttattgtgtctatttgattcttctctctttttttctttattagtcttgctagcggtctatcaattttgttgatcctttcaaaaaaccagctcctggattcattgattttttgaagggttttttgtgtctctatttccttcagttctgctctgattttagttatttcttgacttctgctagcttttgaatgtgtttgctcttgcttttctagttcttttaattgtgatgttagggtgtcaattttggatctttcctgctttctcttgtaggcatttagtgctataaatttccctctacacactgctttgaatgcgtcccagagattctggtatgtggtgtctttgttctcgttggtttcaaagaacatttttatttctgtcttcatttcgttatgtacccagtagtcattcaggagcaggttgttcagtttccatgtagttgagcggctttgagtgagattcttaatcctgagttctagtttgattgcactgtggtctgagagatagtttgttataatttctgttcttttacatttgctgaggagagctttacttccaagtatgtggtcaattttggaataggtgtggtgtggtgctgaaaaaaatgtatattctgttgatttggggtggagagttctgtagatgtctattaggtctgcttggtgcagagctgagttcaattcctgggtatccttgttgactttctgtctcgttgatctgtctaatgttgacagtggggtgttaaagtctcccattattaatgtgtgggagtctaagtctctttgtaggtcactgaggacttgctttatgaatctgggtgctcctgtattgggtgcataaatatttaggatagttagctcctcttgttgaattgatccctttaccattatgtaatggccttctttgtctcttttgatctttgttggtttaaagtctgttttatcagagactaggattgcaacccctgcctttttttgttttccattggctaggtagatcttcctccatccttttattttgagcctatgtgtgtctctgcacgtgagatgggtttcctgaatacagcacactgatgggtcttgactctttatccaacttcccagtctgtgtcttttaattgcagaatttagtccatttatatttaaagttaatattgttatgtgtgaatttgatcctgtcattatgatgttagctggtgattttgctcattagttgatgcagtttcttcctagtctcgatggtctttacattttggcatgattttgcagcggctggtaccggttgttcctttccaggtttagcgcttccttcaggagctcttttagggcaggcctggtggtgacaaaatctctcagcatttgcttgtctataaagtattttatttctccttcacttatgaagcttagtttggctggatatgaaattctgggttgaaaattcttttctttaagaatgttgaatattggcccccactctcttctggcttgtagggtttctgctgagagatccgctgttagtctgatgggctttcctttgagggtaacccgacctttctctctggctgcccttaacattttttccttcatttcaactttggtgaatctgacaattatgtgtcttggagttgctcttctcgaggagtatctttgtggcgttctctgtagttcctgaatctgaacgttggcctgccttgctagattggggaagttctcctggataatatcctgcagagtgttttccaacttggttccattctccacatcactttcaggtacaccaatcagacgtagatttggtcttttcacatagtcccatatttcttggaggctttgctcatttctttttattcttttttctctaaacttcccttctcgcttcatttcattcatttcatcttccattgctgataccctttcttccagttgatcgcattggctcctgaggcttctgcattcttcacgtagttctcgagccttggttttcagctccatcagctcctttaagcacttctctctattggttattctagttatacattcttctaaatttttttcaaagttttcaacttctttgcctttggtttgaatgtcctcccatagctcagagtaatttgatcatctgaagccttcttctctcagctcgtcaaaatcattctccatccagctttgttctgttgctggtgaggaactgcgttcctttggaggaggagaggcgctctgcgttttagagtttccagtttttctgttctgttttttccccatctttgtggttttatctacttttggtctttgatgatggtgatgtacagatgggttttcggtgtagatgtcctttctgtttgttagttttccttctaacagacaggaccctcagctgcaggtctgttggaataccctgccgtgtgaggtgtcagtgtgcccctgctggggggtgcctcccagttaggctgctcgggggtcaggggtcagggacccacttgaggaggcagtctgcccgttctcagatctccagctgcgtgctgggagaaccactgctctcttcaaagctgtcagacagggacacttaagtctgcagaggttactgctgtctttttgtttgtctgtgccctgcccccagaggtggagcctacagaggcaggcaggcctccttgagctgtggtgggctccacccagttcgagcttcccagcaagcctgggcaatggcgggcgcccctcccccagcctcgttgccgccttgcagtttgatctcagactgctgtgctagcaatcagcgagattccgtgggcgtaggaccctctgagccaggtgtgggatatagtctcgtggtgcgccgttttttaagccggtctgaaaagtgcaatattcgggtgggagtgacccgattttccaggtgcgtccgtcacccctttctttgactcggaaagggaactccctgaccccttgcgcttcccaggtgaggcaatgcctcgccctgcttcggctcgcgcacggtgcgcacacacactggcctgcgcccactgtctggcactccctagtgagatgaacccggtacctcagatggaaatgcagaaatcacccgtcttctgtgtcgctcacgctgggagctgtagaccggagctgttcctattcggccatcttggctcctccgagagtgaaccttcaccttagaactcaggtgccaaaataagctcatgaaaccctgagcccacgactcctcttccatggatattctgagcacctgtttcctggaactcagcactgttgcagctgcttgagggctgtgtcagacctgacatcaagaaatatcttctcatctaagactcaccattgtgtggaaagaaagaagaggaggacatcaaaagtccttgtcaccaaggaccctgacagcctttgctaccaccaccactgccccaaactcctacagcctagtctaccagacacccacagtcatttctgacattgatcacagctgaagaagcttcacagaggatatacaactgcttctactaggagcttagagtcaccatgccctaccaaattggcacagtaagacccatctgcaagtgaaagtctttccctataaaagccagtctgtaaagtttggaagaggtgattgtttcaccagatgtgcagacatcaatgcaaggaacaagaaacatgaaaaagcaaggaaacaggacattgccaaagtaacacaataattctctagtaacttactccaagaaaaggaaatttatgaattttctaaaaaggaattcagaataatgattgtgaggaaactctgtgagatttgagataagataggcaattcagtgaaatcagaaaaaaaattcatgatctgaatgataatctcaacggagataaatatcattaaaaagaaccaaataaaaatcttggagctgaagaattcaatgaatgaaataaaaactataatagaaaacttcaacatcagactagatcaagcagaagaaagaaactctgaacttgatgataggtcttttgaaattacctagtcaacggaaaaaaaagaaaaatgaatgaaagattgaagacagtctgcagaacttatgaaatgccatcaagtgaacaaagattcatattaggagaattgcagaaggataagggacagaggtaggaagaggaagcttatgaaataatgaaataattgcagaaaacctccagattcttggaagagatttggacatccagatctgtgaaactcaaaagtccccaaacaagttcaacccaaagtggttctctctgaggtacattataattaaactatcaaaagtcaatgacaaagagataattttaaaagaacaagagaaaagtgtcaggtcacatataagggaaatcatcgttagaatgtcagtgaatttcttaagagaaacgttgcaagccaggagagaaagggatgaaaattttaaagtactgaaaggaaaaagaatgtcagccaagaatactatacccattaaaggtgtccttcaggaataaaggagaaacaaaagtctttcctaggcaagcaaacgttgagagaatttatcaccactaaacccgtcttagaagaaatacttaagagagttcttcaagtagaaacaaaaggatgtgaattactaatgtaacaacatatgaaagtataaaattcaatggtaaaggtcaagtccagaatacttcattgttgatatgatactctgtaaatcgtatatatctctagtataaaggtcaaaagtcaaaacagtcaaaaataatgatagctaccattaattaagaaatgcttaatataaaaagacgtaaattctgacatcaaaaatataaattgttgggagagggcaaaagtcaagagtgtttgtatgagaatgaaattaagttgttatcagtgtaaaatatcctattataactgtatgatgttttgcataaaccatatggcactacaaagcaaaacctatagcatatataccaatgataaagagaaaagaataaaaacttagcactacagaaacttactagattacaaagataaaaaacaagagagggagaagggaacaaaggatctgtgaaacaaccagaatacagttaataaaatggcagtaataattctttacctatcaataattacgatgaatgtaaatggattaaattctccaaccaaaagacatagagtggctaaattgattaaaaaaacaaggtccaactatatgctacccacaagaaacccactttagccttaaggacacacataggctgaaagtaaaggaatggaagaagatattgcatgcaaatggcaaccaaaaaaaagagcagggctggctatacttatatctaataaaatagattttaagtatgaaactgtcacaaaagacaaatagggtcactatttaatgataaagggctcaattcatcaagaggacataatgtctgtaaatatatatgcacccaatctgagagcacctaagacaaatattaattgacattaagggagaaatagacagcaatacaataatagtaagggactttaatatcccactttcaacaatggacagatcaagcagatgaaaattaataaggaaatactgtaattgaactgcacttcagaaaaaaatggacttaacaaatatatacacaactttccatccaacagcagcagaatatacattcttctctagtgcacgtggaacattctccaggacgaaccatatggtaagccacaaagtaagtcttaacaaacttaagaagattggaatcatatcaagtattatttatgaccacaagtatatgaaactacgaatcaacaataggaagatttttggaaaagtcaataatatgtggaaattaaacaacatgctcctgaacaacccagtgggtcaaagaagaaatcaagaggaaaatatcttagcaatatcttggccaggcacagtggctcacacctataatcccagcactttgggagatggagatggacagatcacttgaagagttcgagaccagcttgggcaacaagtgagacctgtctctgcaaaaaataaaaaaaagtagccggtcttggtggcacgtacctgtagtttcagctattcaggaggctgaggtggaagggtggcttaaacctgggaggcagaggtttcaatgagccaagattatgccactgcactccagcctgggtgacagagccggaccctatctcaaacacacacacacacacacacacacacacacacacacacacacgcacacacaataaaaatatcttgagacaaaaggtagtgaagacataacataccaaaacctatgggatacaacaaaagtggttctggaagggaagttcataactgtaaatgcctacattaaaaaataagaaatatttcaaataataagaagaaagattttaaataagtagcccaacattacacctcaaggaactagaaaaagaagaacaagttaaacccaaagttaacagaaggaaggaaataataaaaatcagaacagaaataaatcaaatgagggatagaaaaaccatagaaaaaattaactgaattgtttattttttgaaaacttaaacaaaattaacaaacccttagctagactaagaaaagagagaagactcaaatatatgaaatcagaaatgaaagtggagacattataacagaagcctcagaaataaaaagcttcataagtaactattaagaacaattatatgccaagaaattttgataacctagaggaaatggataaattctttctaaaaccaaggttttgccaaggttgaatcaggaagaaatgcaaagcccgcatagagcaataacaaagagattgaagtagtaattaaaagcctcctaaaaaataaaagcccaggaccagatggctttacggctgaattatactacattttcaaacaagaattactacccaaacttcttaaactcatccagaaaatagagctggagggaatacttcctaacatgttttctgaagccagcatcaccttggtacctaaaccaaagacaccacggtaaagaaaactacacgtcaggtcagtatcaatatctctgatgaatattgatgtaaaaaatcatcaataatattttagcaactcaaattcaagaacaaatcaagaagattatacatcatgatcgagagagatgtatccctggccatgtaagactagcatatacaaattaatcaatgtgatactttcattaacagacaaaaaccacacgatcatataaactgatgcagaaaaagcattcaacaaagttcaacatcctttcttgatgaaaactcttaacagtttaggtatagatggaaggtttctcagcataataaagttcatttatgaaaaaccgacagctggcatcataatcaatgaggagaaactgaaagcttttcttttaagatctgctgtaaggtaagaatgcccacacttgccactactattcaacatagtactggaagtattagcaagagcagttagacaaaaaagaaataaaaagctttcagatgggaacaaaagaagtaaaattatcacgaattacagatgacatgatcctttatgtagaaaaccccaaagactccaccaaaaagctgttagatctcaataaagttgcaggatgtaaaataaagatacaaaaatttcttgtatttctatatacaaataacaacctagatgaaaaattcaagaaaataatctcatttctaatagcatcaaaaataaaacaagatgaaatacttaagaataaattttaccaagaaagtaaaagacatacactgaaaactataaaacattgatgaaacaaattgaagagtacactgaaaactataaaacattgatgaaagaaattgaagaggacacaaatagaaagatatttcatgctcatgaattggaagaattaatattgttaaaatgtctatactatactatactaaaatgtctatactatactatactatactgtactgtactatactatactaaaaagcaatatgtatagatccaatgcaatccctatcaaaatcccaatggcattcttcacataaatgtaaaaaccctaaaatttatgtggaaccacattaaaccctgaatagccaaaatactactcagtaaaaaaaaaaaaaaaaaaaaaagttggaggcttcacatttcctgttaaaattatattacgaagcataacaatcaaaacaacatgttactggcaaaaagcagacacatagacttgtagaataggatagagagcccagaaataaatccaaacatatgtggtcaactagtttctgagaagggcagcaaaaagacacaatgggggaaagaatagtctcattaataaatggtgctgggaaaactggatttccatgtgcaaaagaatgaaattggacccttatcttatatacaaaaatcaactcaaaatggatgaaagacctaaatgtaaaacctgaaaccataaaactgctagaagaaaatatagggggtaaactccttgacggtgaccttgacagtgatttcttggatgtcacaccaaaagctcaggctacaaaagcaaaaataaataaatgggactacatcaaactaaatagcttctgcacagcaatggaaacaattaacaaaaatattgggaaaaatattcacaaatcatgtatctgctaagggttaatatccaaaatttataaagaactcatacaactcaatagcaaaaaaaaaaatgacccaattagcaatgtgcaaaggacattagtatacatttctccaaatatgacataaaaatggcccacggatacacagaaaggggctcagcatcactaatcatcagagaaatacaaattaaaactgtgcaatatcacttcacacctgttaggataactgttgtcaaaaagacaaaaagacaagtgttggtgaggctgtggagaaaaggaaactcttgtatgctgtcagtgggaatatagattggtgtagccattatgaaaaacagtatggaggttactaaacaaattgaaaatagaatgactgtatgacccagaaattgctcttctgggtatatactcaaaggaaatgaaatcaccacctcagaaagatacctgcagtcacatgttaattgcgccattttccacaatagccatgatagagaaacaacctaggtgcccatcagtggactaatggataaagaaactgtgtgcatatatatatgtatatagtgtgtatgtgtgtatatatatgtacactatatatatttcagattgaagaatactccattgtgtatatacacacacattgtacaatgtgtgtacacatatatacaatggaatattattcaaccttaaaaaaggaggaggtcttaacatttgctacaacatggacaaatggggaggacattatgctaagtgaaataagccaaacacagaaagaaaaatatttcatgatctcacttatgtgtggaatctaaaaaaacaaaaagtggttagatatatagagatagagaataaaacattcattaccaggttcacggtgggagagaggaaatgggagttgtaggtcaaagaatacaaaatagcaaatatgtaggaagtacaagttgatctaatgtgcaacatgagaactatagttaatagtagtgtattgtattccggactttggttaagtgagtagatagattatagctgcttttgtcactgggaagggggatgggtaactacgtgagctgatggatatattaatttgttccactgtagtcaccattttactgtatatatatattatactttaaatatatgcaataacatttattttttaaaaaaggacagtggaacagcaaacagcagagcagagctatcacctacttctacagaatttttctgctgtaaagtagggcttttgccttggggaaaactatattgtaaacaagagcagtggaagggtttagcagaactacttcttgagtggaggaaatgactattctcactgggggttttcctgagttcttaccaagctccaatctgtcagtctccactttgagtaaggtgttgagcttctagctgtggggcgatgggaaaaagcaaggaaaacccaggcccagaatcagaattggtgtttttcatagagatagggaattggcttttgtgcagtaaacaaaataggggtcacatctgtaggagaaataaatgaaaagagatggaactttcacatttttatgttaaaataaccacccccacagtcatctaactgatgaaagcatgcctattgcttttgttttttaatgtgtatcagcttggcaggtggacacagtgtcttcttcatcttaagatcttagattagatgtttcttagttaggacttgccacatgtcatttattcataagactgatgtataaatagtttccaaggaatccttaagtgtgataatttaaaaatcaaagctacttctcagttgttacacacacacacatctgatccaaacacacactatcatttcatttgagtaggcattataacttgtgaataaggccagtgttatgactttgagctttgtgttaaccagttatttggtggtcacatgttatgctcatgaccttgactattggtcaaatgagagtggaagaaggggcagtgggcagaaccttagcttgatccaatagggagagccttggcctggaggttgagaaatttaggatctagtagtttcattcccagctggaccatttacatgctcagagatctgctgctgtggcttctttgctcatccgtaaaaggatgcacttataacatctaggtgatttctaagatctcatccacctcacatactatgattcattcagccaatagttgttaatggcctcctgtgtatcaggcactgtactgtgaatatggccctgagctggacagagagatgctgtctttcttctcctagaacttactgtctaatgggagggacagatattaaagatgtgatgatgtaagtaatcatttaaataatttaaatcaaatttcaattgtgataagtgacatgaaagagaagtacaaggtattatcacagtgcttgacaaggagacctcacctagtttgggagttcagggtaccttggagaaaatccccaaaggtcaagtctggattgagtggagcttctaagagctccactcaatatctccaagcacagagaacacataatatcgtaattttccacaaatgcaaaattaaaattgcctaacagaccaggcaaaaccaaaatggagtcagtcatgctaaatgccacgtaatcaaactgaaactttaaggaagcagacagataccctgaaagaacagttttttccctgaaaacagaacattccagtctacctgagtcagcataaatagaaagacccatctgctttaactattaccgaaaaagtaacctgtagtaaccagatgttaaccagttcctcttttttctattgttctgtctcctttttctcatcttacaaaacctactgttctgccattgcccagtgagagctctcattctgttttgtagaatggagactagcctcatccatgaattattaataagagccaagtcaatctataaccaaatttgttgtaattttgtcttttggcaactctaatgacactttatttttgcttcttcgatgatgcttattacttcctatcttgttaatttttttcacataagtgtccatttgttgcttaatttaacatttattcagaactaagtccagttgtaggttatgggactcccacaaactgagaggggaccctaactctccaggaaattagataggcatgtaagcaaatggctataatataacatgaacaggagctaaccagttaagaaaatgttgtgagctccatgagggtaggattgattgttctgcaacctttattcatttatgtattcttccaacaaatacagatatgcttcattttattgtgctttgctctattgcccatcacagatactgtgtttttacaaattaaagctttatagcaaccctgagttgaacaagtttactggtgccgttttttccaacagcacatgctcacgtcatgtctttgtgtcacactttggtaattctcacaatatttcagactttttcactattgctatatgtgttatggtaatctgtgatcagtgatctttggacgttactattgtaattattttggggcaccatgaaccacacccatataaaatgacaaacttaattgataaatattgcatgtgttggactgtcccaccaaccagccattccctcatctctctccctctcttcagacctatttcctgagacacaagaatattgaaattaggccaattaataaccctacagtggcctctaagtgttcaagcgaaaggaagagtcacatgtctctcactttaaatcaaaagctggaagtgattaagcttagtgaggaaggcatgttgaaagcagagatgggccgaaagctaggcctcttgcaccaagcagttagctaagttgtgagagcaaaggaaaagccttgaaggaaattacaagtgctacttcagtgaacacagccttattgctgatatggagaaattttagtggtctagatagatcagacctgtcacaatacttccttaagccaaagcctaatttggagcaaggcccttactcttttcagttctatgaaggctgagagaagtgagaaagctaccaaagaaaagcttgaagctagcagagttggttcatgaggcttaaggaaggaagccatctgtataacataaaagtgcaaggtgaagcagcaagtgctgatgtagaaagtacagcaagttattcagaatgtttaagatctaagataattgatgaaggtggctatagaaaacatataaggctgatgcaacaaccttatattggaagaagatgctatctaggattctcctagttgaagaggagaagtcggctgggtgtggtggctcacacctgtaatcctagcactttgggaggcgaaggtggacagatcacaaggtcaggagtttgagaccagcctggccaacatggtgaaaccccatctctactaaaaatacacacaaaaaaatagccaggcgtggtggcttgcatgtgtaataccagctactcaggaggctgaggcaggagaattgcttgaacccgggaggtggaggatgcagtgcgccgagattgcgccactgctctccagcctgggcaacagagcaaggctctgtcccaggaaaaagaaaaaaaaaagagagaggagaattcagtgcctggattcagagcttcaaagctcgggctgactctcttattaggggctaatgcaactggtgaccttaagttgaagccaatgcttacttaccattccaagaaccctagggcccttaagagttatgctaaatctaccatacgtgtgctctataaatggaacaacaaagcctggatgaccgcacatctgtttgccgcatggtttactgaatattttaagcctattatttagacatactgctcagaaaaaggattcctttcaaaatgttacatctcattgacaactcacatggcaacctaagagctttgctggggatgtacaaagagattaatgttgttttcatgcctgctaacgcaacatccgttctacagtccacggatcagggagtaatttcaactttcaagtcttattatttaagaaatgcagttagtaaggctgtagccaccataaatagtgatccgtctggtctggacaaagtaaattgaaaagcttttggaaaggattcaccattctagatgccactaagaatacttctgattcatgaaaggaggtaaaactatcagcattaacaagaatttgtcagagtctaagcctcatggatgtctttgaggggttcaagacttgagtgaaggaagttactgtagatgtggtagaaatagcaagaggactagaattagaaacggaacctgaaaatgtgactgatttgctgcaatctcatgataaaagtttaatgaatgagaagctgattcttatggatgaacaaagtggcttcttgaggtggaaactactcccagtaaagatgctgtaaacattgttgaaccaacaaggagggatttagaatgttttataaaggtagttgataaggcagcagcagggtttaaaaggattgactccagttttcgaagttctgctgtgggtaaaatgctatcaaacaacattgcatgctactgagaaatcttttgtgaaaggaggagtgaattgttgaagcaaacttcattattgtcttattttaagaaattgccacagtcactccaacctttagcaaccatcaccctgatcagtcagcagccatcaacatggagtcaagaccctccaccagcagaaagattacaactcactaaaggctcagatgatcattagcattttgtatcagtaaagtattttaaaattaaggtacacacattgatttttagacataatgctattgcacacttaatagactgtggtatagtataaacgtaacttttatgtgtactgagaaacaaaaaaattcatgtgatttgctttattgtaatatttgctttatcatggtgttatggaactaaacctacagtatctctgaggtatgcccatattcactgaatacctgttgtaatccagacgtcatgctaaacaaaggggatagaaagatccaagtgaaacaaaaaacaaaaaagagccaggatatcacctgtttgatgttcatttacacaaactgctgcttaactacacttgtgatgagtgttattttttatttcactttgtaaaatttgcatacagtacaatgtgtaggtcggaaaacttgaagtttgacttcataaggagagttcctttctgccctctttgaattcagcttccttctgtccttcacagtaaaccattcttgtgattgctaacatcataaattagttttatatattcttgaactttataaaaaatagaatagtatagtacgtagtcttttgtgtctggtttcttttattgatcataatgtctgatattcgtccacagtgttggatgaattctttcttcttttctgatgtaaacattggatactgtacatttcttctaaatggtgctttcactgcattctcctctctctcattttaatatatcctgttttcattatctttcagttcaaaatgttttctaattttccttgttaatgctcctttaacctgtggtattaaagtcttcaaatatgattgtggatttgtttatctgtttagttctgatggatttttgttcatgtattttgaaactctttttattaggtgttacacatttaggattgctttgtcttctggttaaggttatcattttatcttttagattttatcttttatcattaagaaatattcatattagtgtgaatattcctggttttgcagcagtagcttttatatggtgtatcttttttctgtacctttacttataacctgtctgtaattctggtcttgttctttttttttttagtctgacaacctctgccttttagttgaatggtttagtcatttacactttatgtaattattcatataattggatttgccttcttatatactttctctctgtttttgttgttgttgttgttcatttcttttcctgtcttcttttgagttaattgaatgtgctttagcacatcacttaatttctctattgtctttaaatctaccttaatttttggtattatcatttatcttttatatatgttataaatctcataatgtaacatttttgttttgcttttgattttgctttaaatggctatcttctaaagaaattaatgtaaagacaataatatatttacctacatatttaccatttctgacactcttcattccttcatatagagttgagtttccatttgttatttctcttcagcttaaagaccccttttagcaatttttaatttttgctttgcaagtctggtagcaataccactcagcttttgtttatctaaaaatatcttcgttttaacctcattttggaaggataattttgctggaaatagaattgtgaattgacagctaattctttttcttttagcattttaaggatgtaattccattctcttctgatctttagtgtttctgatgatatatccgccaacatttgtatctttgtatctttgttctcctgtattcagtgagtcatttttctcttctgctttcaagagttttctcattatgtttgattttcagtgtactacacagtgtgataaggatgtttctagatgcatatatatatctatatatatctatatatatagatatctatatatatatatatctgcttgctctgcttggagtttgctgacattttaaaatattctaactatatttggaaatttttaaataattatttcttcaaaatgttacctgcccctttctctttatatttccttctggaacttaaatgatatctatgttacattgcttaatatcctcactgtggctcttttcatttgtttccaacctgtaatttatctacaagtttattaactttttcttctgtactctccaatcttccattaaaatcatttagtgactgttttatttcatatattgtatttttagttcctggattttcattaaatcttttttttattttctatttctttgctgaaattctccatctatacactgattatgtttttttttaagtctttgaatatactgacaataacagttttaaattccttctctggtaatttcgccatctggttcctttctgtttcttttgactgctttttctttttaagtcactttttttttttttgcctcttcacttgtctagtaatttcttatagtatgctagacattgtgttatatgttttactgatttgtatacatttacttataagattcatccatgtaatgtaagtttaaatcaattaaatttatactaagaaatagtatagtttaaatcaattaaatttatattaggaaacaattattaaagagatgaaaaggagagaatgatatactacatagcagggcagcctccagtttgatcttgtgcattctaacattatatcagcagtgagaacaacattgacttattcattccaaaagaactacacaaggccatcttctagataaatgaaagagaaaaatgcatttctgttatagaatcttgaaatgtaaacattgtttctgaaaaccttataactttgacagcttaattgtattagtaccatccctttctaaatctatattaatgtattgatattgacaagtttaaagacaaaaagtgcaactttacagtaatgataattgataaggttttgtttgaacagtcattttattttgcaatttagagggagaaaataccattatttgcttcttccaaagttgtcttttatttgcctgtgcaaagttaccacgttagtgaccctctttttttctttgccgcttatgtgtttagaaactctggtctttttattcctaattgcatgaataatgaacaacttggaaaaactcctatatcttttccccattgccctaatttttcttgttacaacatttttttttctattgtgactataagtcttaatttgtgggtaatggtggctacagaagtctgaactgttcatttataaagtgaattctttcctaccaaagtccttggctcttttattattcttttaactttttttttttttttttccaactgggctttctcagagcctggggatatttattttaaataaatagttgtttcaaacacatttgttttaaataattcattttaaacacaatatgtcaccaatttcaattttattaaatatttcaatgaacaaatacttctgaagtttcgttttattgtttttacatacacagtgtgattgcggtgtttcagacgtcaaaaactttgtaaagggggcatttggggacaccagagcgttcttggcatatccgaaattatgctagacaaacccttcatggttctgttaattataatattcagagtcccacagtacatttccataaaacttagtgtttctttcattaagatggctgactgcagaaatcattggcagaccccagaaattacctcaggatctttctccagaaaattctctgacagtaaaggggaatgcccttaggttgttgattattcactaagaatcttgtgatccagggatttgccaactactgtttaatttttaaattaaaccttgaatctggtggcaatcccgaaagtagacaactcaccataaattttccactcttatttatgtctgttaatttacctgataggaattagaattaattcttttctactttcaagttattttttgatgtagattttcataatatacatatctccaagcatatgcctgtggcatggtaatcctaatttcttccaattaaaaattattttatgactaacaactttaggatatttctccttgttggtaataatactaataggatatagtaacaatgataagagtaatagacaccattattgataatgtgttaagtacaggcagtggcataagtccttcacagacattatttcatttattcttctccctataatcctgtggggtagatactattatctctgttttacatatggagaaactaaagattgagaggccaagtgatggacccaagttacagacaacagtggatggatgaatcacacctaagtctttctggcttcaaagaccagtaagccatattgcctcagaggaccataggttgtaacattgacctcatttttcactggacaaaatcttgtgaagaaataaattgaagatgaaacttagggattatttgaaagatctgtcaagtaattcaaaaataaattttctagaatggtaaattctgacccagaaatgcgtgaaacccaaaaaaacccctctaaattagatataataacttagtaaaaatgattaaacattgctttattattattacagatgtatacataaggcgaacagtttgtcatttggcaattggatctattctccacatagcacgtgtaatcttttaaaatacaaatatggttaagctacttagttgttgacacttgcgtgttgcttacacttagaataaaatattaactcccaggtcacttgcaaagctctgcacacctgcccaagattatgcagtggattggcagctacctccaatgttttcccttggtgtctgctctgctcctgtctcattcccttccatttttggagcccccaataggattctttttgtcccttttctgtctcctccagcaaaatataagctctgtgagagtaggcacctgacatctagtagcatgtccacaaatgtttgttagaatctgttacatccataatggtgacacagttaaaagccacaggtgattggttatcatcagagttgtgaattgttagtaattcatgaagttgtcatctgtttatttcaattagaaaaaaagctgattctttctttaaaaaatacttatagcttaatcataggagattcaattattgccgtaaaattcaaacacattttcatatactgacaggagaccattagtgaaacagctggcttttgttgttacttataataaattcatcagtttgctggttttcctcatctagatgatatttttctgccacttaatatgcaattataaatatataactatacaattaattatgaacaaggtaattgattatatttaatggctgttaaattaatacttataaggttattacacagatctatgcttataaagaaaacattttttaaattggatacaaaaaattggaagggaaacatactcatacaactcaagttgccactgtcaggcaggtgtccacccgtctccacagtcccatactcagagctatagacatggtatgtctttggcaggcagtctcttaaaaaatacaggtaggaactcagagggaggcataatcggcttctaaggatgagtgcttcatagcaaaaattgtgtgtgttgaggttctgcctgaatatttgtgtcaatcagaaagtatacttctaacgttatcatcttggaatacctttaaaagccatgagagtcagtctttcatggaaaatcctagatctgacatttcacttgttcacagcaaaataaaacaacaacagcacaaacaattgggaacacaaagcaaaacaaaacagactttcccatgctggtaggtattaatggaaggtaaaataataattttcttgtttggagtattttctttagtagccagagattctgatgttttactaatcaactgtgtgaacttgggcaagtcatatgttctttcagactacgagttgggactagtttattttctttcctgatctagaattatctgagtctttaagattctgatcttttacatggaaaggatagcaactatttttctgcaggttgtatgctcattcttttaggaaatctagcaacttctacagatatagcattatcctaagggaaataatgtctgagaataaaattacctattatctccctaccccctcaaataaatataaactttctactttaaaactgaagcaggtaaattccaaggaaagattgattggatcattcacacacagatcctgcaaataattttattattttagatgacaggggttcatgtttgttgtggtgtgtgtgtgtatctgtgtgtgtgggggggggggtgggggggttactcctgtcacccaggctggagtgcagtggtgtgatcatggctcactacagcccggacctcccaggctcaggtgatcctcccatctcagcctcctaaatagctgggactataggcatatgccaccacacccaggtaatttttacatttgtaataggagacagggttttgtcattttgcccaggctggtcttgagctcctgggctcaagtgatccatccgccttggcctcccgaagttccgaaattacaggcatgagccactgcacccagccaagggttcttttgaataatataaaaggactttttttgggtaattttaagaacttaactttcaaaccgtaatgcctgttttactctagacgttagtttgctgtctagttgaagatattaatactcagaaccagattaagcctttgctttgacttacttggaagtaattctgtcctgcatatgaatgtattcataatctatccttcttcctcagaagtttcagtttcaccatgaaatgtttttgtgtgtgtattttaaagccttttgtcttgttctacttgagattggctgaaatgtagaggtcactctgattaagaggaggaaggctgggccagaggaaaaggaggaattatagcttaaaggcgatattttttgaaatccaggtcaagaagaatgatgagccacaacacagcttttgtctggtcagaatgcctcttcgattacaaggaaataaaagatgattccttatgtctgcctctgctgtttgctgattaatattctggatgaggtagatattcacctttgaggaaatgtcttctgaaaacagaaagacacagatttgaatcttggctttttttctcactggtggtgagactgggtatatttcttacatgcctagtttgtatagttaggaagaggataccctccctacagggtgtcaggctcccacaggccagttgatctacatgaagtattaatatttggtatactgtttggtagagatgatgatcccagtttggggtaacctttattattattgtcgttattattttgccccatacccttgaaatacaaagatgttgattatgtttataattgcatatttaacctctacctcctttgtagactgtggcctccagggaccacgtctgctttcagccctgtcagcagagcttaagcacacatctggcactcagtaactatttgaaggactgaatgactcaaggaaaaagtggaggatcatctcaagagttagatatgcagtaggatgagagttaaaatacaatttgccaaagaggaaaagtgacaatgccgccagcagaattgggagtcacttccgcagtaggaaggctgttcagtctcggaacttgagccatgtcaagcctctttggaccctggtggcccacaggatggggtgtcctgtgtccacagaggggctgtgcttaaacccttggtcacacttataccctcctgggtgtgggtggcagatagaagcccccatcttactagtcagagagaacaaaagacctggaacagtttccctgtgcagtcagccagttttgggcgctaggccagctgactgctcagtttcatttcttgttgttttacacaagtacctttatatatgagtagagaaacacgaacaagagactgctgtgaggacacattttatactattgttccaatttcattaatggccttgaaggatatccctcttatgattgccacaagtatcctgctttcattattaaataccagttatttattatattctatacttctttttggctctgtgtgccaactttttctgggacctcctgagttaaaagtgacatttaactctagggcaggtagtctgagaaaatgctgtcccactgaagtttccaggagcacctccatgctcttagacatatcttagcacttacagatgtctggaatctaggcctttattcattcagctttaattttttgttttatgagatggagtcttgctctgtcacccaggctggagtgcagtggcatgatcttggttcactgcaacctccgtctcctggattcaagcaattcttctgtctcagcctcctgagtagctgggactacaggtgcgcgccaccatgcctggctaatttttgtatttttagtagagacggggtttcaccatgttggtcaagctggtctcaaactcctgacctcaggtgatccacccgccaaggcttcccaaagtgctgggattacaggcgtgagctactgcacccggcctattcagtttttgtttgtttgtttgtttgtttgttttcagatggagtctcgctctgtcgcccaggctggagttgagtagtgcaatctcagctcattgcaccctccgcctcctgagttcaagtgattctcctgcctcagcctcctgagtagctgggtctacaggcacacgccactatgcccagctaatttttgtatttttagtagagatggggtttcactatgttggccaggatggtcccgatctctttacctcgtgatccacccaccttggcctcccaaagtgctgggagtacaggcatgagccaccgcaccttgtccctattcagcttttaaagacaacattactgtcagattaaaatcagcaaaattctctttggtttagtgtcgtctatattggactttcacaggtctcatatgccccaacttcatctgcaggttttgacctcagatctcagtgacatctcctgccaggtccacttccagtctcaggttattatttgagaggagttacagaaccttggctcagattcacaaggtgtgccttacactttagactgttaggcagcatttgggggttatgaccatcaaattgaatcctcagaccaatctcaggggaggagatgtactattattgcccctacttcataaatgaccaaactgacacccagagaagttaaataaattaccaaaagtcacaggggaggaagtgctgcacctgggatgcaaaattagctgagtttgttgttgtttgttttttctgtgaccagtgggtaaacgttaggatttctggaaagcagcttttgttgatgaatatttgccacatttttctttgatctggtagtgtggagtgatgggaagttgtaataaatttggaaaacagactatcaaaggtacaggttgaattgagtcaggtaggcggcttttctgttttcttcctctattgggttacagcatggtgtcctgtagtatcaatgctattgcatctgtatttcctagtcaccctctacaatatccatgatgctctttcctggaagttttgctctgagatgaagcaagaggcacccgtggtcagatagatgctggggcagtgaatgtgtttgtggtgtgtgggaacatatctataattggcagcatttctataccaagggccttgtgtgcttcttactgtagaagacaaatctttccttgggtgaatatctttgtttgtttattgttttcttggatgtgcttgcaaaagaaatgttctagaatattttccctgaggaggaaagattctagaatatttttcctgagacttgtgacagtcggaggtgcctgatagagtgaatcagacactgttcttgtgtttgcttttgctccctctgcccttttttctattatctttcagcttaatagactaaagaggggaaagaggcagagcaggtgacacctgctcctgagccaggagggcctcaggggtcccttgggagtgtctgcggatgggattctatatacccttccagtgtggcagcaaccagctctggatttgaaaagttcacctggactccacagaggggtggggcagcggttgttgtcatatttgctttttctgggagaggtaactgtttcctgctgcacggttatcatgttgagggttgggaagcagggcatgttgacgataagaatttaatgaatgcatatgagaagaggagattcaagccactgagcagtgtattgccctaggcgacttcacgtttcaggatggtgagatatttaagggagtatatttcagatcatcatggaagaaaagatgtgcaagaagcactgggataagagcccttgtccttccctgtgtttccaacagcaggtgggcagtccaccacaccgagagccttatgaatcacctctcagttttgtccattgtccttgttcttataattcatttgtagctttaaaaatatgattaggtctgcccttgtgctcattattccatgtggcagagaggacgtgttttaatatatccttcgcttctaattgtagtgtctgcatgtcagggttcactggttggagaaaacgagccctgcttttgtaaagcagttaattgaacctggtaacgatgattgcctgcagtcccctggggtggttctggtccctgggcttcacccctcatggtggtttccagcggctaatgtgctgtgacactaaagatttttcaaaaggtaacagcaatagcaaattggagtttgtgtactacaggccctaattgcagtagtgttagtaaccttttctgagtttgtatccgtctctggtgctagggacgtttgaagagcatgtttccaattttgaaatgtttaagaaaatgtttaaggaaacagacaaaggaccagtatgaaggatatagaaagaaccccttccatatcaataacaacaatatcaaaataaaaactcatcagtatcaatctgctgcaaagaaacagtagatatataggcaacagatacgaagagtgagttgacaggagtggaattccatggacaaagaaaagatgctcaatctcattagtaatcagggaaaagtaaattaaggcagcaccattttaacaatcagttggcaaaataataatgatgatgatgatgatgatgatatcaaatgttggtaagggcctggggaaatgaggttcttgctggtatagccacactgcagatccattttgcagaagattttaaaactaaaaatgcacagaccctacgaaccagcaactccacgccttgcaatctgcctacagaaacactaactaacacatgtgcaccagaatgcggtgttgtttgatttagcaaaaattgactaactgcctaaatgtttgcctgtgtgggaaaagctaaagcaactgtggcctatccgtggaatgggacagcaggcagaaacgttattccttctagaatgaagcaattctacaggtaatggctgggatgatgcccagagaatattgttaactttaaaaggcagaggcaggattcagaattatttgtacaatatgatataatgcaagttaaaagggaaactgatcatatatattttgcatgaatagctaaatacgtctatcatgagagaggaaaaagtctgttgatgacatctgggaagggcctggagttagcagtgggatcaaaggggatatgtgccttatctgggatgcttagatttgtgtaagaaaattatttgggggtaatcaaaattgaatttaaaacatttttaagataaaaagaagaaatgaattagagggtaaatattcattggtgtctacaacttgtttataatagcttgcaacctggcattttttaatttaagcctcaggatcctacctggcgttttggggaaagtcaactgagacctgtgtgcctccctctcctttgcaccctcagcccctagtaccgtgcctggcacagagctggtactgattcgctatgctctgaattcatattgagcttggagagcaatgcttatgtggagggctttgttgactgtgggctgcaggcatgtatcagtgatcagttatcatcatctgccttgtagtcagaagtgtgcccctggcttctgattctggagagtggactctgtacataggccctggttttgaataagcctctctggtttttctgagtaaaaagtgccttagcctgtgtcagagtggggattccatcctttccagcttgatgcttttctctgacctacctggagcgttaggaactaggcccacctcatgggtctgtgacatgcccgggagcacaggctccatattcaggagggtgccatgctgggtttaatgctcttctgttgccatcttgaaattcttattttttttttttttttgagacagggtctgactctgtcactcaggctggagtgcagtggcgtgatcacggctcactgcagcctcaaacccctgtggtcaagggagcacagctcagccttccaagtagctggtactatagctgcacaccaccatgacatgctaatgttttccgggtttttgtttgtttgtttgttgggtagtgtctgtgtgtgtgtgtgtttgtagagacagggtctcactttgttgcccaggcaggtttaataatttttgaacaaggggccctgtattttcattttgtactgggcctatagattatgtaaccagtcttggttagagtgagctatgggaccttcccacagccaggctgcaaaaagaggcaggagcccctggggtgcaggtgcagctgtgaggagaagctcctagctcctggttccatgaaaagcaaaaagtgctaatgttgattgaggtacaaaaggagctctttatgacagaatggactttcgtgtttttcaaaggaggccacagaatctgttggtgtttttgccctgaggacaataaccactccctccttttgtgcctggatgtacattagctgatcacatttcctgatgggcctgagcctctctgaaggaaggctttactacatgactcctggagatgacgaggcttttatcctctgctgaataactctgttttgcattccagtcagatgctgagctgcagatggagccaggacctgggggtgggctctgtactctggggatggagcaagtggccaggaggcaacacctggtctactgtggtccactgcacttagatttctccgcactgcctctcctatccttgccattctctccctgcatcctcccatccccacatcctgtatttcccatatctgcatctctcacatcctcttcatctctgcatccccactttcctgcattctccatattcctgcatcgtctgcatacctgcatccccaaatctttccgattaccacgtttctgcatccctgtgtctctgcatcccatctgctttgctcacagagctggacgtgggggtacagaaaaaagagagaaggacccctgacctgttctgtctcctccttgaagcagcctcagctagtgaaggaacatggatttagaagtcagaaagagctgggcgcggtggctcacgcctgtaatcccagaactttgggaggctgaggcaggtgtatcgcctgaggtcaggagttcgagaccagcctggccagtgtggtgaaaccccgcctttactaaaaatacaaaaaaattagccaggcgtggtggcaggcacctgtaatcccagctactcaggaagcttaggcaggagaatagcttgaaccgggaggtggcagttgcagtgagccgagatcgtgccattgcactccagcccgggtgacaagagtgaaactccatctcaaaacaaacaaacaaacaaacaaagaagtcagaaagatttaatttcaaaggccaggtagccatttaatagctgcgcaaattcttaggcaagttactaactcctctgatacacaggttaaggataaaatgagagaggaatctaaagcaccaggcttaaaattgtttaagcatcttcccactctgctgttcatctccttttctggaatttcccatgtatccctgttgtcctctctccaaccctcagctctaccccacctgaacacctgaggataccagaaatggccaaggcagagtgggttcgggttttcctctgaaatttaggtaaatcagtgaactcacctctctctcatgatcacttttgggggagctcagatgttgcttgtgtcagtgaaccagcactgagttccagactctgaagcactaggccctgggtcaggccctaaggctagagaagggatgagttccctgccccggagcatcccactgctctgccttctaacagcagactaaagcttttggaggtctggctcaatgagtgatcttgctgcccttccacagacgtagaggggacgtacacagatgggccctttggtagcccagatttcatcagggcagttaaaatcagcatactcctagcctcagagacagtagccacctgcatggcacgttggaaattggttagtttagataagagttgagttgttccttctggtcagacagttgaatttcatgactataactcaggtgtgtgtcctggagaatttttcagatagacgtcatctctggcttacatagtggtcaagagaagaggggaggggcccctctgtatcatagattagctggttggagacagctggtagacacattattattttattctgaaggcacaggatatttgcaaagtttacttcaggcaccaaacactaatttgaaatatatatatgtttaagaatgccataaaatagcagtaatttttatagctctaagttatgttgttgttctttagccttccgtctttgttataaactgcactttagagatgtgtcataatatttgcctttccactccttttaatgggttgggatattttggaatcaattacacagtgcttttgtttctcacattaaatttaccaccagttattcccttaaatattttgaatactgaaaataatttcttaggtgacattaattatgatgcacctccctactgagctattcttccctggcaatattaatgatagtgtttcagcattcctgactggctctgtcattaatccttcataaataccagccccaattagtgtgcacaagtgaaatcagttgagcagtgaaatgtgtgtgccacaaatagaggatagatgctgtgtctgtcccttgaggaacaactgaacttgtcagctgtcaaatctgaattcttaatagttcttgtgtaaaaatgcattctttgattttttttttcattttacaaagtaatttgtaaccacagttggtggtgatgtctgtttgtaaagtcttatcctttgatttctttgcattctgttaaatcagaaaatcctttctagattcaaagataatatgctgttaatgtgtctgcttgtactgtttctacctttgtgtcttccttgacccttccttgtttttctttctcttctctctccttctctcttccttcccttctttctccctcccttcctctctcttctacccaccattctttcctttctttatgttctgcgtaccctttctgtgttttggactgcattaccagaaggcaggaacgagactgtttacttgagtatgtttacttgggcgtgaactgggatgccctctgcctggtcatttggtgttgtagagtgccagaaagccctgcacatgtaggttatctgtgcgtatctgttgatgaataaaatttttcataaaacacaatttttgaaatgtgttaacagagagcagtatttaaattagcaaacatctcggacacatgtgcttcttctccttgggtctcccatccagaaaatggccgttcatttggttaagatgtgccgggagggcctcagcatcatgcttggtgtgcactcccagttagggacccaggattatttattttcaaattaagatacttttaaaaatgaaagaggaggtattgatgattactcggacaagagctggaagccagaactaccctaggcaaatggtaggatctccagatacaatataggacacacagttaaatcttaaatgtaaatttaactgtgcctcctgtatttttatttgctgaatctggcaaccttatttgtagtcataaacacatgagccatgctccctgccagtgcggagcgtctagtctagtaagcataactccaggttactgtcctcaggcactatgctgatgatctaacatgtcacaacaggattcacaggttaataacatccccaaggtcagacaggtaggacatggtatggggaacaagggatcaggacctggaccagaaatccagctgcctacaaagcccttgttttctctgtgataccctcctccctgaccagcattgtggcagcaaggagcttcttttgcgggcttttaagagattctgcagggaagttaagagccctcaacatgatttctccactgctagattttccaggcagcaggaggcaaccagctgttttcactgtatcaaacccaaaacatgtcaggcagaaaaaatgtcaagtcattttgaaaaatgtctgaagcataatgtgcttgacaggggtgaaatagcattggccatagtcacgtaattactacctcagtgtttgtttaccatgcagccctttcttcttccacttgaattaaatcaatctgagcaacaatgtggctttataaaacccagggctcggctgcacacaacagttagactttctcaggttcttcgtaagcgtgaaacttgccaggttgactaagcaacttaacagtttcttccatgttcatatctttagactaaactcagacagacttattgaattaaagtaaatgaaggtcacctatttttttctgcaaacaataaatgttaagataggatgaggcactgggggccgagatctgatttgaatttaagctgcagccagacaccataatgtgaccatccactagatgtcgctgatgattcgcaccagtgcagctgcaagtccatttatggatgttaaaaaaagtctttaaaaatgttgggccagagttaaaaaatctggaactttgatatatttctttttttttttttcaccttttacttttaaatatcttctttgtgtccacccaaatgggccttatttctgctatcaacgatctctttctacctttcaaaatttagcaaaaaacaaattaaagagggtaacaaaaatctgccttatttaaaccatctcactctttgtgtatgttgcctttcttccaatatttttgtgaaactcctcagatgtcatttccttgatgcattgggttagtctgtattaacataatttatctagttactgtagtgttcctacatccgatgaagttgattttcctttttacagatttatgcttgatttattgtgaggaaggaaaaatctgtcttaccattggggctttgcccttgacactagtagagatcagatgcctgttgtagcccaaggagggtgaatctttggtcagcccttatggcttaaagacccaagctggtgggatgtacctggaggaagatgcgatggtttgggatggggattataaagccagccctctctggtatatggaataaattctcagttgggcaacaacaaaagcagaaagactggcagctgctatagatttccactcttaatgagctacatttttttcccccagagcatggctaatatgggataggatcctcaaatttaaaaaaggaatgttaaaagggagcaagattagctttaatcaactaaaaaaaaatcataaaactaaattgcagaaaaacttgagacccatggaaagttctcttgtaaatattataatggcaagcagtttttttcctttcctttccatttcttttctccttgtttcctttatttctttctttcttctctcgtaattttcaaatggcaaaccacctgatttggggaggagggactgggtaggtgagtgtgtctgtgattgtgaatttcggctagatcctgttttcacaggagaatgctggtatttgtagtaccctctttaagagtggtcataagcttctcagctgtggctgaggagccgttcagtgagagttgaaaagactggtagatttcctaggggttatatcatgatggtgctctgtagacaactggactgcgaatagcactttgccagactctactcaagtcccatgcctacccttggtacccagcaatatgaagccccctaaaatgtgaagtacttgtcttttgccacagatttttctcggatgttggaatagcattcacttgaggtaatttctgtttcattttatttttgaggtaatttttaaatagccttctatggatttcattatactgcagaaaatttaacatccgtgaaataagaataacgtaatcataagagggttagatttcccagtcattgggaagaaaaggctctaattccctgatgataatctgacaatctgtttagagcaatagggaatgaatgccctataaatgtgtacttgactatattggagatggaaattggaaaaaatgcagcatcaaaacacaaaacactttctgagttccaccatagtatgaattaatcatatttaatgctaattatgtccttgctgcgcaactactttctatgtaaattgtgggaaaatgtgaaaacatttacaagccccaagcaagttttacaatgagcttatatatgcggatttgttatttatttgctaggtgtctctttcaatccaaattattctgtgcagatttatcaaaatgttgtgttgctattttttactttcaaaaacattactgatatgttccctccccttcaatcaaagtgttaaaaatattgaggttgggtcagtaatacagctttcattgagttgttgagcttgttcagaattctctatgcggatattatgaagattgcccatggattatttggcttttgtgatttataactctttgtctccagaactgacagttggaatttataccatcaagtaaccagttttatatctttgattaaagttttcaactcaacacatgcagaaattggcttaatcctggacgtgatttggttgcttgatgggttttgggtattctggatcctttggatatgtctagggtctcccctgcactaagctccaaaccacttgtatccatgagtctcttccagacctgcaatgactttgacttttagactacagttaatgccttaaatatatgaagattctgtcattggagggttcctctacattttttgattattaaggaaatttgcttgacaactaattctttagtgcaataactgataacagttgacccttaaacaacacaggggcttaggggcgctgactcctgcacagtaaataatttgagtataatttttgactccccaaaaacttaactactactagtctccttttgaccagaagccttaccaataaacataaacagtcgattaacacatattttgtgtgttatatgtagtatataccatattcttagaatagattagctagagaaaagaaaatgtactaagaaaaatcataaggggcctggtgcggtggctcacggctgtaatcccagcactttgggaggctgaggtgggtggatcatgaggtcaggggattgagaccatcctggctaacatggtgaaaccccgtctctactaaaaatacaaaaattagccaggtgcaatggcaggcgcctgtaatcccagctactcaggaggctgaggcaggaaaatcgcttgaatccaggtggccgaggttgcagtgagctgagattgtgtacagcctgggtgacagagtgagactccgtctcaaaaaaaaaaaaagaaaaaagaaaaatcataaagaagataaaatataatatagaatatatttgctattaaatgaaagtggatcaatcataaaggttttcatcctcattgtcttcacattgagtaggctgattaggaggaagaggaaggcttgttcttgctgtcttgggtgtggcagaggtggaagaaaatccacatataagtggacctgctcagttcaaacccacgttgtttaagggtcaactgtatatatgtatatttttaaaattttatggttatgaaaatatggctttatttttatttattttagacagtctcgctgtgttgcccaggctggagtgcaatggcgtgatcttggctcactgcaacctccatctcctgggcggattcttgtgccttagcctccagagtagctgggattataagtggtgccatcatgcctggctaatttttgtatttttagtagagacggggtttcagctgtgttggccaggatggtctcgaactcctgtcctcaagtgaaccacctgcctcagcctcccaaagtgccgggattacaggcatgagccaccacacctggccgactttatagctatattaaaatatacatttctagctttatcaaaatatgaacttataaaatgcattgataaaattggttgtttaaacctaatgtccattcacagaggctccttagataaatttcagccatcaaaaccataagggtctatctgtggctgtaatggtggaaaaaatatacatgactgtgttttcaggcaacacgaaaaaaatcaaaactgcagaatgctttgtatttttgtggtctcattttcataaatgtgtgtgttcatagatatacatctaaaagcctgtaaatcatcagaataataggattatagctatctcaacattctgatccttctgaaccttctaatttttatattatttttattatcagaaaataaactcttttctgtctgggataaacaatgatcttgttattattattatttcagatctctcgactcactgtgtgttttcagatggtgttatcaatatataactagagcaaaaaaatgcagatgtgtttctgtaatgaggtgaattctagaatacaatgtttttctccaaaatattttaattcattttaaagaaagaggaaacgaaaaacatgctctttccctaattatctgtgattttttttcccttgaaagcaaaagtactgacatcgcattctaagtgttcagtgccagcggacccagttgatgtgtttctccccacccaggcttggttaggattctgttaaggtattattgaaacactacaaacacattaagaatgtgaggctttcagcatatgcatattgctgctgctctgtatatagatttttttcttttctaaatccctgcaggcattaattttaagaaagcctactggattcagtgtattttaattaaaatacaaaatgaatatggagtaaaggttggcactttggtcagtttccctaatatgctgtctgcattgtatcttctgagttccaatctccatgtgtttaaatgaagacccaggatgactgggtcttggtttgatgtcatggtctttttcaccatgccttttgcgtgggtcaaaaaaaaattaagtggtggaattatttttttaaaaaattcaaaagttttaaatttgggtaggctaacacattttaatcagaatattatggagatgatgttatgattccaagcaaaaaatgaacacacatctacttgccaaatgaataataaaatgactctgttgagctcaacattccaacgctggaggttggaagagggaggagtgcagctagctcatttgggaccatgagtgttgcttattgcagctatgactggagggggatttatgtacttgtccaatgtctaggtctctttccagtgtagactctatcaggatggagacagcatctgttgccttctttgttgatgtaactacagggataagccagtatctgcagctaaatagacatttgataaataaatattgaatacatgaatgtattctggaaatagagctttcatcttcagatatgtctgtcaagaaatagctttcctttgatcaaatattcttttggcttttgtaaaattaaaatttgaattgtacaaagtaacacctgaatccatcctccttggacaacattagaacatgactgatatttctggttccagcaaaggagtatctccattaccccttgcttctccctcttgtaactaaaaacatttagatatcacataacaaatgagcgtaggaagactttgaaagatgggagaagacagacggcctgcggacctttgcacttgaggaagagcatggctgtgggtcctctgagtttccttgttacttctcacacattatgaacagagtgctccagaagcctgccacctggacctctaatgggtacagactgcaagaaaagcctgttcctcctagacaaaggacgaggaaaagggtggcctaatagcataaaatcttttgggtgatattcacccagtagcagccaaggaccaatggaaatactaattatccaaccccctgaaatgatcttcgcatgctcctaactagcagaagcaagcagcattgcttccattcccccacctggtggtgtcagcggaaatgagcaaggagctaatcgttccttgcctgatggaagcagcagcgctccggttctcccactgggtggtgtttgcatggctgagcaggaacccaatcttccatttcctccttggtggaagtaggcagtgctcctgttcccctgtcagagtactgtcagtgggggccactagtgaaacgagcctccactcctgcccagcatcagcaagactgaacaaggcaatgcaagttgggggtagtcagctttctgttttcttccattctagtggtgagctgtgcttacactcccacccagcatcatcaagactgaatacggcgatgaaagtttgggctatcaacattccttctcctatgccgatgaggagctggacctccacacccacccagcagcagtgagactaaatgggatgttgtaaagcagagctagctatcattttgattttggcccactcccagtcccccaccagtgtcagtgggacccatctggcatcagtgagactcatcaaggttgtcttgttcagggcttttgggtggtcccagttaactaacctccccaaggacgatatttcttctttggtttgatttgcatcagaggtgagtcttaggtgctgccatctgatgcgcaggcagcttattctggcagtcctctgacagcatgctcagcagtagcaggctggtggcctgggccagacacagtcaggggtcaggcccacccaaccaggagggtctccatctggagaccattctcagagttgaggggattcttccccctttcttatgcttgtattcagtccaggccagtttccaagtgtttctttcataaagaaagtttaagctattctagtaagggtaagcttcgttttaaggtttatgaaagttgcatctgtgctaggcggccttatctttagggtaaccaggatttataggtccagttgtcatagagacccactaatccctgggctaggttggaaatccccaggccaggtttcatcatacttctaatggacatgtagtgtaagcccagcaggatgtttgattaggcctatggctgacattaatcctataaccacagtatgccttttatagtatactacaaagttgatgggaggtagggctactcagtctccccagccccagtgtgagtgggactcagtgggtttccactctacctagcatcaatgaagtggaacaaggtagtgggaaacaaccagtcagcactccactcccctgccctttggggtcagtaactcagaatggtcctagttctgcagggagagaagcaactttcgtatgcattctgcaccaacaaagattgtgtcatctctccgatcctgcgtgcctctggtgttagtggagtcccatggggagctgagcttttacctgaactcagctctaatggggagctgagcttacacccctgcaactcaggtgatgtgaattgtagccccatgttcactgggaagatgtcagcagggctgaggggagagctgaacttccaccccatttaaatgcaataaggcagtgtgactcagtgctccacttttgctaaggtagtgttgacagggcccagtgggaagctaacgtacactcccacccagcccttctgccacaccttggcagggggaatgcctgcaaaatgaagagatgaaatagaatccagagtcccataatgtaatatccaaaatgtccaggatataataaaaatcactcaccataccaagaatccagagaaatcataactttaataagaaaagacaatccacatgaatcagtaatgaatcagatgttggaattatctaacaagaattttagagaagctattatataaacacttcaagaagcaattacaaattctctgcaaacaaatgaaaattagaaaatcttagccaaaaacagaagtaatttaaaagagaaccaagtggaaattatagaaatgaaaaatacagtcaccaaaattaagaaaaaacctcacgggttacacttactagtagagtgggaacgacagaggatagaatcagtgaaattgagaacagatcaacagaaattatcctagaatttacttagtttgaaaaacagagagacctaaaggatctttggaataataacaaaagaactagattcacatcatctgagatccagaaggagagaagagaatgagaccaaaaaataatggctaaacaaacatattaaaaaaaactcatcatcactggtcattagaaaaatgcaaatcaaaaccacaatgagataacatctcacgccagttagaatggcatttattaaaaagtcagaaaacaacagatgctgttgaggctgtggagaaataggaacacttttacactgttggtgggagtgtaaattaattcaaccattgtggaagacagtgtggttattcctcagggatctagaaccagaaataccatttgacccagcaatgccattactgggtatatacccaaaggattgtaaatcattctactataaagtcacatgcacacatatgtttattgcagcactatttacaatagcaaagacgtggaaccaacccaaatgcccatcaatgatagactggctaaagaaaatgtggcacatatacaccatggaatactatgcagccataaaaaagaatagagtccatgtcctttgcagggacatggttgaagctggaagccatcattctcagcaaactaacacaagaacagaaaaccaaacactgcgtgttctcactcataagtgggagttgaacaatgagaatacatagacacagggagggcaacatcacaccctggggcctgtcgggggtggggagcaaggggagggagagcattaggacaaatatgtaaggcatgcggggcttaaaacctagatgacgggttgatacatgcagcaaaccaccatggcacatgtatacctatgaaaggtatacacatcagaagaaacaagacaattatacttaaagagtgaagaggttaaagggacctaaatgcaagtaaggcttctgcacttcattagaagtggtagaacatctgttacagtaggctccaataaattatgcgtacatattgtcacacctagagcaaccactatttcaaattggtaattctcctttttggcatttttcaaatcatggtaatacacttgtattccttccaaaatgggtagtattggcttgtgaggattttacctaaatggttacatactctacatggcattctgcaatttgcttttttattcaatagttttttcaatgagccgtcgtaacgactgtgtttgctatgaatgcaccacttcatttttctgtccctttattgagagacctttttcaagacattttcccagacttaagccattacaggcaatgcacaatgggcatgcttgttgaaggctccttcattccatgtgtgtgtttttggttttgaatttttctaagtaaaataaaaccccttgggtattttcccgtgtgttgtttccttggctcattctggcccatctgttaagtcaggttcttgcagctcccacttaggtgggaatagcttttctggaaatgtgagctctaagagactcagatgcattcctgcattatggtaggccttcagccaaggggtgccgatattgccagtcactcctcctagacctcaaggatgttcaagaaatcttttcataatgtccaaggagccctgattacacactgatccatatctttgaggatgcctgggaccacaaggaaattcacttttttaccatcttcctttcttcactctctttattcattgcagcatggatgaacatgaactcttgcatttttctggtcaaacatgatggttaggaaaccaagtggatggtgaccagaggtgccaacactgcagtcaggtaacaaggaagacagacactcattggctgagagtgtttgcagttggtgcactgtcacatggcagggggtgggcagacagtatggatgcttagcagttctttgatgaggtaggaggatgatgcatagatagagatatttacacagtgtatatatgagttctgtagaggcttgtttaatgcagatattagaaacaactagagttataaaaaaaactaaagtttctctgaagatgaaggcttgttaactccatgaaaagggttatagaagtgcagaagagtcactcctttataattactataatgctctttgcatgaggaaaactggttggtttctaagtgaatctttcttatagctcccttgtgggctacttcctaagtatgaaataattcattttaaaatgatatgtgaagtatgtaaaataattgtaatataattacatagtgaaataatttagaagctgatatgtaaggggttttagttactaatttgtgtttcatgatatgccttaggatgggtgatttacctttaccaaccaaaataaggaccacgaagacttttacaaataattgtcagttccaaaaaccttcctgaaaaagtgttgctttgggaaatcaagatgacctttcatggcagattttagagcaactccctgggcgatggaaaagctctttgagaaatcaaagtgtaattaatgcacatttctttgtttaaaggaacgactgaattgaattattattaaaagcatataaggtggcctgtcttttgtagctagggcatttagatgactaaattatgacaaagggagtattgtatttatcagctattatcattctaaatttgcataaaagtaatcataatagtgagagacattaagtgcattaattatccattaaaggggtaatttaacaatcattaagggaggcactaatagattggtgatcatctttacaaatgatgtacttgatctaagctttatataacaccaaaagattaatctgccatttttactttggtagaatatacattttgttttagttttctggtagcttctggtaagaattgaatattggaatgaatgagcaagcatacattttgtacctcctataactctgcagaaggtatgtgggaatacaagtgcccaatcagtcgaccaggtgtggattgatcaccttggctggatggatttcatttccacctgccattttgagaaaccttgccattgtctcaagagcagcagctgtaaaagcagcctcactgctctcctcagtgtccctatcccattgatcctatggcagttgggggtgcccacctcccatcttcgggttatcacagctagcagcctagagccacgtttgtccagctaatctcatgtcttattttgaaatattttgtctcctttgaggttactgtgcttgcaaattaaggaaacccactcaagctagcctacataaaggagggtgtgtgtgtgtgtgtgtgtgtgtttgtgtgtgaagatagagaattagctcatggatctcaagggcagcagaataatcaggcctcctgagggcttcgggcagggaagaagagagttcttagcaaccaaggcagtctctgtcacccacaagcacttatggctttcctgtcagcctctttgcagacctggtttctctgctgtgccagaaagtgactcctgccccctgaatttctgtgtctttttgaggccagtgctggcagtccatgggctggagggtttgagtcccactcccagatttttaggagggagaaacagtgggtggctgtgttttcgtggtgctaccacgcctggttcaagaagccatggccaggggacaggcttgtgtcataaagcatggcttgggggaggcagtcacagaggaggcttgcccttgacctctaggaaatacactttcctcatgatgggagactgagtcctcctcacacatcaggaaagggggaaccagctctcactgttttccttccatcccgtctgccctctttccccctccctgccccacaactgtctgcagtgcttctccaatgtgacatttatattgtgtcaccatcacatttaataagctgaggttgttttgatactctgatacccacaaatccaagtgtcctgcttgtggtcaggtgttactctgacgttgcctggccagcctagcattcagtcacctatggaccatcccagcacccagcagggctggcttgtgccctcaccctttccttacccacacctttacccactccttgactgggatgccctgatctctctcctctctagtaaaggaggtccagcccagcccagtggacctggggttagccctgtaatgcatgaatggttatacctaccttaaaggattagtataaatgccacccagctctgacctttctcctgtgggctgacagctgtgttaggagggatataagcagtagtagttgtttttctttaaggctcagatgaaacccaccctctggaggaagcccaccctaaccatgttcttttctatcttcaaactgcttttattagcaaacaactattctgtaagatgtactggttgtcctgagctccctttctgaattgcagacttttcaagggtaggaatggtgtcttctatttctttttaaaaaaattatttttatttttattatactttaagttttagggtacatgtacacaacatgcagcttagttacatatgtatacatgtgccatgctggtgtgccgcacccattaactcgtcatttaacattaggtatatctcctaatgctatccctccctgctcccctccgcccacaacaggccctggtgtgcgatattccccttcctgtgtccatgtgttctcattgttcaattcccacctatgagtgagaacatgcggtgtttggttttttgtccttgcgatagtttgctgagaatgatggtttccagcttcatccatgtccctacaaaggacatgaactcatcattttttatggctgcatagcattccatggtgtatatgtgccacattttcttaatccagtctatcattgttggacatttggcttggttccaagtctttgctatcgtgaatagtgccaccgtaaacatacgtgtgcatgtgtctttatagcagcatgatttatagtcctttgggtaaatacccagtaatgggatggctgggtcaaatggtatttctagttctagatccctgaggaatcgccacactgacttccacaatggttgaactagtttacagtcccaccaacagtgtaaaagtgttcctatttctccacatcttctccagcacctgttgtttcctggctctttaatgattgccattctaactggtgtgagatggtatctcattgtggttttgatttgcatttctctggtggccagtgatgatgagcattttctcatgtgtcttttggctacataaatgtcttcttttgagaagtgtgtgttcatatccttcacccactttttgttggggttgtttgtttttttcttgtaaatttttggagttcattgtagattctggatattagccctttgtcagatgagtagattgcaaaaattttctcccattccgtaggttgcctgttcactctgatggtagtttcttttgctgtgcagaagctgtttagtttaattatatcccatttgtcaattttggcttttgttgccattgcttttggtgttttagacatgaagtccttgcccatgcctatgtcctgaatggtattgcctaggttttcttgtagggtttttatggttttaggtctaacatttaaaaatgtctttaatccatcttgaattaatttttgtataaggtgtataattcattgcactcaacactcatttcttcatcattaaacaaatgtgttctagttcaattcaaaaaacatttctaagtgccttttatgtgccaggtatcattcattgaaaagattatccgttacccaacaggggcccatgggctgaatgaataatgacgaatgatatatttgattggcatggaaatgacacagaaactgtcatattcaagtctctacttatgcattgttttatactggctgttgaacaaagaaaaccacaaagacctgttccctttgctcaaatatgcttaaataatttaaaactttttttagagatggaggtcttacgactgtgttgcccaggctggtcttgaactcctgggttcaagcaatcctcctgcctctgcctcctaagtagcaaggactatagatgtgtaccaccgtgtccagctcatacgcttaaattgttgatatggacttaagtagtggctatatctagtggtctctataggataattcacagtacccattccatctgccttctcccttgcctcattccccttgatctctcagcctcccttgcatctctgaatgctcatgtggcctagttttggccaatgagacattggcagaagcttctagagaatgcttcttccatcacataaaagcatacattttataaagagggccctttactccttctcccttcctttggcctggagcacagatgctgtgcttggaggtgtagcagccattctgctactatgaagatgaaagccacagactaaagatggtgggcttggaagatggaatctggtacatcaatgatgtgcttcaacagctccactttcccttaactgtccacttgtgaacatcattatccttgagaaaaacaaagatcttacttgtttaagccatggtggggtggcttttctgctccttgcagctgaacgcgccgtcaatgggctgatattcatgtagcagcatcaaatctttagctgaagagtgataagaattcatgctgtgtggttcatgtagcttaattcagtagttccctaagtcagcctttactcatccattaatccaatcaaccatctaggtgtccattcaatatgtgtgaacaggcgaagggccctgcctatgtacagcactcagccaggtcttctgagaaacagagggtcctgtcgtacccgtcgccagcctcttcatgagtcgctatttgagatgagggtcagagactaaatggggacagaactcaagattttggttgcttatgaaacccattccaccatatagtagcctcttgggaatttatgccccacatctccctgggtctgccttgtctgtagaaatggctgttaatacctacctagaagagggggctaaatggaacttttaaaggtgtaatgtactggaaactcctggctcacagtaggtgctgaataaagttaatggagaaagtagcaaagggaaactcttgcagaacaacaccttgaataaacttctcttattttattggtgaaagagacaacatatagtcgggggatatggggcagctttatatgccagaagcagcctctggggaattcaggctagaccaggaattcttccatacagccagccatttgccttttcctgtggttgtttagttttgtcatatgaagtgtatgcatgtctgtgtgtggtgggtgggcgggcacagtaatgaggcaaaattcactttaggcagcgtcttagattgtggtacatttgttgcaaaacttatgattggcaggttgcagtttctgtatatttggatccccatgtaaaattgctccttgtccatagctgttaattcttttgggcttcttcactaggaagaattagagagttggcagggggacagggcctcctggattgggtatgctttcttcctctcacctgacatgtccaccaagtgttttcctggtggagcagacagatccttggccgacgaccctggcatttgctctgcttcccatctgcagacatgccggtggggatttggcattccttcctcactgggtcggctacattgtgttcagccttcacattcgtctcttgccatgtcttgtcttgaatgcagatagaaaaacttgggaaggaaaacaagtttcacggtttcttcctttgatttgagtcatcggtcatagatcaaagtgaccgcaaagtcatctttgctttgtagagttctattgcaaaacatgctgctgttttgttttgttgggaagggcatggggaggatttggcttttatttactctgattctctttgcttctggacttcctcattgtgttgctcaacatttgcagcgaacttgaaagcaccaggggatggccactatatcccagcaaggcaaggaaggagtggagacccgggccacattttgtttatcaaaggcaatgggtatgacaccgcatttcccccttatctatttccttcttcttttcagcacttcccagtgaatttccttggttgaaaatattaaccaaggtgcccagctgtctcctagccagaggggacctgtgatccaaacctggcctgttagagtctcccaggaatttaatttgaggaaaatgtcccagacacctttttttctagcatcttccttaccacattaatgagcaattcctgcttacttggaaattcagggtggccctagtcccttatttctcaagtcttggttctccagccttgttgattctgtgaggtcccctgtgtgttttcaaaacattccctgttagtttaagttgccataatcagtgtcttttgcttgcaaccaaagaaccctggtgatgcagtgggccttttcataaagtggtcttgtgatgtggtgggccttttcataaactgctctatttttggtttcttgtacttttctctcattttgcccatggatggctacctcctgatctgataaagaaatcaaggaggccacataacatgcattagggccatatcatgtcaaacatctcctctctagaggcacactcagagctgccagcagcatgtagctctcacttttctcagttttaagttaatggttagtctgaattttgaggccctcagagctgtctacttctgaataacatgactataggagcttatgagtccttactcagaacttggctcatcactcagtactacttttaggatttccttattagaaaaccaaattccttttactattgctttagagataaacatccgctttcttggagaagactctgcctttgcaagtgcagctaaaattctacaccctccatgaagccgtcttctcatttctaccctctcccaacccccttaaacagagtgagcctcttcctgccatgagggagtctcagtctgatttaaatgtactggagaatgcagactccagagcccacctgtaacaggcaggtagcagatgcatgtcaagtcaaccaggtgtccaatgacaaatggtagtgattatgagcctcggctcagggatataggcaggggatggggctgggacaacccccctctaaggtgggccaccatggctctgcttcagccattggcaccctgtggaaagctaggtccactgttgccacagctggaaacccagatttggaaacgaaccatctcatttctttaaaaaatgttggcaatgaattgaaagttaaaacgctgatacttcactactcaggccgagcaaaacatgcctgcaacatgagttcagcctggagtcttgagaattcttaaccttgaatactcttaggaaaccatttctgagctgtattaattcatagataaaagcaacttgtaagagagcattcatagaaagaataaataaatttgtttttgtacatatatatgttcatacacttattctatgtatactttttatttctatgtatacacacacacacacacacacacacacacacacactcatgtgaagaaggagaaaatggagcattcatatctttattgccagtgattatatctaggaggggaggaggtagggagtgttggagacttccaatttttgcatcacatttctgtaatgtgtgagtttttagttatagacataccttattttggtagtcaggaaaaacagaaaggatccatccaacaaaaacagaaaggaggggatgggccagcagttctgtgcttatgcggttacttccagccactcccttgttctaggagggtagatgtttataagacctctcatgaacttgtctcagagctccctgaaagaggaactgctttgttcctgtggtctctccagtgcctgtcctaaaagatgccctagcatataggtgactgttggagtgtggactgagtggcctgaaagaatggatgaagcaggtgtacatagctttggcaatgaggaatccaggagtaggttggactgcctgtgggttccatccacacatgttcatagaagaagagaacatgttttcggggagatgtcttttcgtgttttgctggaagatgtctttcctaacctgtacttttacaagaggcttcaatttcaacaaccttcatgtctcctaacgaatatgctgtctttctttaacatccatatgtgatagaatcagtgcctttatgtgttcaggttctcagttttcaaatgttggccaatttggtcaagaactttcatgggggaaaatccatagagcatagagagggaggacctccctctgcacagatgggtctactgaaacctcccaagggatttgcttagataaggacccacaggtggtgaagggcagagggaagaaaagaagtaaggtgtctgggcccacagataaagctccttcccacactatgctgctgccttttctttaaaaactttcagaaaagaacaatggataatataacaaacatcaagattaccacccagaattgatgggtattcaccttttatcatttttgctttttttgtgtcctttttttcccttaaggagtactgcctctttttgatcaaatcatatttggggtatagtgctaatgatgggattcctaaatgacatttaagcaagcctcatgatgatggtgtctaatccctctcagaatctagcctgaggatgtcgttttcatctcctgacagcgctggcagtgcacgatatctgacatatctgccccagcatgcccttccctggcctcccctccctccccactgaattctctgcacctctgactctcctggaatttctgaggcagttggtatatggggcaccaagtgagtgtctctgaactctccagctctccgacaaggcctcttccaaattgtgcatccttcaaggtgggatcccggaggcgggtatcctagaaggagcgttttttaagtgaggcattgacatcttgttaactacataataggcacttttttcagccaacaaaactgtccatgttttcaaatgttgtggaccaggcgttatgagctcagcttcctttgatcagtgttacacaacttttctgagtgctaatctgtttcaattcaaaatagatgaaaaccaccacatgcatggcagctgcaggtttttgcttttcttaaaaattatctattttaaggaaagaaaatctgagaaattatattgtgatgggtgaaagtattaacgatgaatttgttgccaagaagattaaaattgagaatgtatgaaaagaaaaaagaagaaaaatcctggaagagcaagttgtctgaggcaaacatcaggagtttcaaggctatttcaggactggttcaagcctaagaacctcaaatgtctgtgagaggaagtttccagaaactaaactctttccagtgttttgtttttgtgtcagtcaaatgttgtatacacagggcttggaggccagaccacagaagtggtctcatgtgatgtggcagggcctttgtggcctcagagccaggcagagcttttgtttatttagattcttgttggccttgaatgatggcaggaggacagtcatctgttgctcctgctgacattcaggcagggactgcttggttctgttaggccacagttacacgtcaaagcaaatacaggccagagatcctgactttcctgttcttttgaaagtgatgctttggcagtgggggaagaaagctgcaaggattagtcttgtcttgacgtgtattgctgtgagccaacctttgggctcttttagatgacatttctggccattccaggatggtaattttaatcttgtcctttgtcttggtaatggatttatgttcttcaataatactttgggagagagttccagaaagaactaacaatagaaaaacccgtatttagtgatgatatcagtgggaagtgacagaaaactccacacaaagtagcacaaccacgagggaatttacgaaaagtttcaaggagacatctggcttcaggtaaggatgaatccaggggctcagacgacaccagaatcctacttttctgcatccatagttcagtctcgtcttcctgggctggtccattctcaagcaagctgaggtgctgcagtgccagcctcacatccttccagatccaagcccagtgggaaagaagaatctgcctccctggcagctcaacataaaggtctccaaactgaggctcattgcctctgaatggcctgaaaaattagctaagacctatgcccagctcagagctaatgggagtaagtaggtgagtactggctgctgaggcctggatcaagagcagcaggaggagccatctcctctagttctgtgttttagaccctgtttgatccaggaatccaaacaatgtcgtcaggacccaagcactctcactctgtctctgtttcttcctcccctgggttatattcccatcagttcccccaaacgaaagtaggagagacctggtttcacccaaaacactggaggatgaaacagaggtggggtgagggatgccagaaggcccaaatctgtaagtgtcccttacaaaaaagtgtcaatgtgctaacaagtggaaaaacgagtcagcagccttcatgttctcattagtgtcctattgtctccacctctgtgggcaccaataccccatgattaaaccactctagacctctattgtgtttgtgaacccagtggacccagctgtctctattgtccagaactctggtctttgtgacaggtgcttcacttatgcattattatatcattacaatgtcttattttcacaactgcaaggcaaattgcagaagaacatttggcaggagagccataaatcgtttgtgcagagataggttcatcttctgttattttgtgtctcttcatgtcttggattgactcaagatgaatcaaaaaatgagtactctggaacaatataagactttgtcttgaatttatttattttagaatggttaatgtcattcaatcaaccctcagtgaaagacaagaagtagcaaactactttttaatgtcatcattgaactgtagttttgaatctccagttctgtaggttaggttgcaataatatggagtaaagaagctggatccaagaatcaatacgtgttctgctactaatcacactccattaatacctcttatagagtgaatggacaaaccacaagagagagagcgctctggcttcatttgatacaaacaacataaaaggaagagaattgctcttgttgactaatattgaagaattggctaaatacaggaatttatctctatgtgtagctgaatacttagggcaagacaagtttactccatttaagaacatagtgtgttcacttcatgtttacaatgaaaaatatttgctaatttggtgttttaagttttgtttcaagtgtggttttctttatattaattaaaatataacctcatttgccaattttaagtcattctgtgatatggtttggatctgtgttcccacccaaatctcatgttgaattgtaatccccattgttggaggtggggcctggtgggaggtgattggatcatgggggaggtttctcatggtttaacaccatcccccttggtgctgttgttgagatagttctcatgggatctggttgtttacaagtgtgtggcacctccacctacctttttgtccctgctctgccatgtaagatgcctcactccccttttgccttccaccatgattgtaagtttcccaaggcctctccagaagcagaagccactgtgcttcctgtacagcctgtagagaagcaaggaccatttaaacctcttttcttataacttacccagtgtcaggtatttatagcaatgtgagaatagactgataccctttgtatctaaataaatatatgtccacaatctctactatttgtcccgtcttttggatattttttatataaatgtaataattggaaacaccagttgtttttggaagaaataattataatatttaagcaatgtaatacttttctcacccgttgtaagctaagtcaatctacaaatcaggttcatggttcacagtttgccactgattggctctggggaactaggtgagtctctgcctgtattaatttcctaggaccttcataacacagtgccacagactcagtggcttaaaaacaacaggaatttattatttcatggttctaaacgatagaattcacattcacaggtacctagggttaggacttccacatatctttttgaggggacacaatttagcctacaacatattgccttttggcctccaaaaattcatatccttcctatgtgcaaaacacattcaatcccaacatctcttcacatcttaatccattccagcatcgactcttaagtccaaaatctctgctctagtttgaatgtttgtcccctatgaatctcatattgaaatttgatccccattgttggaggtgaggcctaatgggaagtgttggggccataggagaggatccctcatgaatagattaatgccctccctggttcaggggaggggatgagttctcattattagttctggtgagtgctggttgttaaaaagcgcctggcacctccccggccctctctctcttgcttcctctctcagcatgtggtcactgcacacgctggctccccttcaccttccaccatagtggaaggagcctgaggaacctcttctttataaattacccagccttgggtattcctttatagcaacactaaaggaactaagacaatctcatgtaattataatcaactcaaaaggtcccacatctcatcttctaactcatttattcaggtgtcagggagactcagggtgtggtgcatcctgggacaaaattcctctccatttgtggatctgagaaacaagttatctgcttttgaaatacaatggtggaactggcataggatagacattcctactccaaatgggaggaattggaaggaataaaagagtcatggataccaagtaggttcgcaacccagcagaacaaactctactaggctttaaggcctgagaatcattctctgtggttcaaggctccaccttctgggtaccaggtggcaacctcaacctcttggccctgccttctctggcttatgaatctgtgcccctgacgtcagattcattcttccttcattttatcctatgtctgtccctttctgctgatataataatcttttttttttttttttttttttttttttttttgagacagcctcttgctctgtcaccaggctggaggctggagtgcagtggcgcaatcttggctcactgcaagctctgcctaccgggttcaagagattttcctgcctcagcctcccaagtagctgggactacaggcacacaccaccacgctcagctaatttttgtatttttaaaaccttgttagtcttctacaaatgtcaagtggattcatgccattagacagaaagattcttcacagatttttcctggataatcccatctctattccgggcttctctttaggtgattgattgggttcacgagtcacatgcctaatctctccataggaagtgtgtacagttacgctcttggtgttctctccagagtgtgctatcgcattttttgctaactggatagactgaaaaatttcaaaatcacgaagtgtggatttctttttgattaacaattccatcctcagtttatcactttcctctcacatatcactataagcagcaaggaaaaactaggccacaccttctgcactttgctttcaaatcatcttcaaggtcatcacttataagttctgctttctacccagtggtagaagataactcagccaagttttctaccatttgataccaaggcaaattttataccactctgtatctcaataaatacatacacacaagctctaggattacctccagtgccctttcctcctgcatcctccagtgtctaacaactttcctccagtgtccaataacatgttcataatttccttttaatgcctcactagaagtacctttaaacttccttttactagcgacattctgttcatgaaaatatattgtattagtctgttctcaggctgctaataaagacatacctgagactgggtaacttatcaaggaaagaggtttaatggacctccagttcagcatggctggagaggcctcacaatcatggcagaaggcaaaggagaaacaaaggaacatcttacatggtggcaggcaagagagcttgtgcaggggaactcccatttataaaaccatcagatctcatgagacttactcactgccatgggaacagtatgggggaaattgccccccatgattcagttatctccacctggctctgcccttgacacatggagattattacaatttaaggtgagatttaggtggggacacagccaaaccatatcacatgtgtcttctgtaagatgatagtagctctttctacagttttctttctgaactcgcactggaattgtctttaatgtctgtatttctcccagcagtctctttaaagcaacctaggctttttctgtcttgaatctcaaaattattccattacccaatccaaagccactgccacatgtttaggtacttgtcacagcagcacttcacttcctagtaccaaaatctgtattaatttcccagggcttctgtaacaaaataccacaaagttgtggcttaaaacaacaggaatttatttcatggttctggaggcttgatgtctgaaattgagatgtcagcagggcgatgctccctctgaagttcttgggaagaattatcccttgcctcttctggcttctggtggttgctggctgtccttggcatgccttggcttcctgctgcatcactctaatttctgcctccctctccatgtggtcatcttccctcggtgttcgtctgtgtttctatgtcttctttttttctttctttctttccctctctttttctttctctctctctttctcctctttctttctgacagggtccctctctgtcacccaagctggagtgcagtggcatgatcacagctgtctgtagcctcagcctcctgggcttaagcagtctccctacctcagcttcccaagctgctgggaccataagtatgcaccaccacacccagctaattttttgtattttttgtacagatgaggtctttctgtgttgtccatgctagccttgaatttctaggctcaagttatctgccctccttaacctcctgaagtgctgggattacaggcatgagccactgtgcccagcctccttttcttataaggacagcggttatattggatttagggctcaccataatctactatgacctttaattgactttttacatctgcagagacccagtttccaagtaaggtcacaatcacaggtacctgtgggtaggacttcaacatatcttttggggggacttaattcgacctgaaacaccatccctctcaggactttctgcttccacatttatacaaacgagatctttttggttgccattaacagaaacacagctcaaactagcttaggcaaaacgagcctgttttggctctcataagtgaaatattcatgggtagttcagatttcaggcagggcccagtccaaggattcaaacaatgtcttgctcttgctctctctcttgctctctcaattccttcttcctctgtcttggtgttactgttaggtaagttgtgtccatgtggttgtccccaccagttcctcaactgcttatatgccagagaaaaggacctgtgttgtaataatatttgcacaaaagtcctgggccctcccattattagttcgagctgtgcaaagtacctgtccccacatgttggggagatcgattttattgtgtggtttatgcataagtcacatattctctactggatccagaggtgcaatcagtgacacccaaaccacatgagctgaaatcatggaaattagtgtatagttagtaaaagaaggggagagccttctgggcaggctagcactgatgtccttctaatttgttaggtggaaaggttgaactagcatgtctctaatatcagtactaacagtcctatgaatctgcacacaccctccactgattcttggccaagtaattatatgtggtagccctaactgatcagtaaaacactatttcataagatgtttctttttaaatttattttttgaggactcaactttagtaaagtataatttgcatcaataaaattcatacactttaagtgtacaatttgatgaattttgacagatgcattcctttatgtagccaacatcaaaatcattacaaacgacatttccctccctcacccccaaaagttctcttgtaccccggtgtagtcagtctcctcaccccattgcctcactcctggcaaccactgattggcttttattattataactttgcatatggtatttcaaaaattatcatttataattgacacataataattgtacatatttagggggtaccatgtgatgtttcaatacatgtgcacaatgtacagtgattaaatctcggtaatcagtacatccatcacctcaaacatgtatcatttcttcatattggaaatgttcaaaatcctctcttccagctatttaaaaatatacaataaattgttagttatagacaccctacagtgctatgaaacattagaacttattcctactatatggttgtatgtttgtatccattaaccaacctttggctatccacctccctctttccccacctctaataaccattattctactctctgcttatatgggatcaacttttttagcttctacatatgggtgagaatacacagcatttgtctttctgtgcctggcttatttcatttaacataatgtccttcaggctcatccatgttgcagcaagtgacggaatttctttcttatttaaggctgacttgtatataaatgtgtatacattccacatttgctctgttcattcatctgttgatgaacatgagttgcttccctatcttggctattgcgaatagtgctgtgataaacatgggggcgcagatatctcttcaacatactgacttcctttcctttggatatatacccagtagggggattgctggatcatatgatagctctattttgagttttttttgaagaacctccatactgttttccataatgtctgtactaatttacattcccaccaacactgtataagaattcccctttctctgcctcctcaccaacatttgctttttttgtctttttgatgataaccatcctgaggtgagatgatattgtggttttgatttgtattttcctgttgattagcgatgttgagcattttttaacatatttggacatttgtatgccagattattttgagagatgtccactcagatcatttgcccatttttaatcagattatttgtttttctaatgttgtatgagttttttgtataataatccattttagacgagtagtttgcagatattttttttcccattttggaggttgtcttttcactctattgattgttttcctttgctgtgcagaagtattttagtttgatataattccatttgtctatttttgcttctgttgtctgtgcttttaaggtctttgccataaaatctttgccagatcaatgtcctgaagcatttctcctatggtttcttctactcatttcataatttcattttaagatttaagtctttaattcattttgagttgatttttttctatgtggtgagagatatgggtttagtttcattcttctacaaatgtatatccagtatttccagcaccatttattaaagaggctgtcctttcgctagtgaatgttgttggcacctttgtgggaaatcagctggctccatataactggatttatttctgggctctctattctgttccattggtctatgtgtctgtttttatgccagtactatgttatattttgaagtcagatagtatgaagcctccagctttgttctttttgctcaggattgctttggatattcagactcttatatggttctatccaaattttaggatttattttctgtttctgtgaagaatgtcattagtattttgatagagattgcattgaatctgtagattgctttgggtagtatggtcattttaacaaagtaattcttcggtatattcatgaggctgggatgtctttccatttttgtgtgtgtgtgtcttcctgatttctttcatcagtgttcatagacttccttgtagagatcttttgtcttgttggttaaatttattcttaagtattttatttatttttggtaccaattgtaaataggattgctttcttgatttcttttttagctagtttgttgttggtgtgtaggaatactactgatttttatattaatatattgattttgtatcctgcaactttaccgaaattgtttgtccgttctaagagttttggtggagtctttaggttgtttttctatatataagatcatctgcaaacagattcttttgagaatttttgcctctgtattcattagggatattggcctatagttttctttttttggttggtgttgtgtccttgtctggtattgtaacagggtaatgttggcctcatagagtgagtttggaagtgctacctcctcttcatttcttggaaataatttgagaagaattggcattagtttttctttaaaagttgagcagtgaaaccactcggtcccgggcttttctttattgggaggtttttaactacaactttaacctcttggttcattattggtctgtttgagttttctatttcttcttggcaaaatctttataagttgtatgtgtccaggaatttatccatttcctctgggttttccagttttttggcctatagttgcttatagtggtctgtaatgattgtttgtatttctgtagtatcagctgtaattctttttttgtttctcattttgcttacttgggtctttttttttaattagtctacctaatggtttattaattttgtttatcttttcaaaaagccaacttttcattttgttgatctttttttgttctgttggtctcaattttatttctttctttccatgtactaatttggggtttggtttgtttttctagttcattgaggtgtataattaggttatttgaaatctttctagtttttttgatgtatgcatttattgttataaacttccctcttaatactgcctttgctgtatcctataggttttggtatgttgtgtttctgttttaatttgtttcaataaatttttcaatctctttcttaattccttcattgacccatttgttgttcaagagcatgttgtttaatttacatgcatttgtatagttctgaaagttcttgttactgatttctagttttattacattgtcattagaaaatatagttgatattattttgatttttaaaaacttgttgagacttgttttgcgatctaacatatggtcagtcctggagaatgtcacgtgtgctgatgaaaagaatgtgtcttctgcagctgttggatgaaattttctgtaaatgtccataggtgtgtttggtctataacacagcttatattggattttttttattgattttctgtatagatgatctgtccagtactgagagtggggtttggaagtccccagattttattgtattggaatctatatatcttttgagatctaataatatttgctttacatgtaaatatatgtgcacacaaccatatatacatgtgctctggtgttgggtacatatatatttacaatttttatatcctctcactgaatgatccctttgtcattacataatgactttctttgtctcttcttacagcctttgacttaaaggtctttttaaaatatgtaagtataggtactcctgctcacgtttagtttctatttgtatggatatcatttttctattcctttattttaagtctttgggtctttacatgcaaagtaaatttcctgtaggcagcatatagttgggttgtatttttgtatccattctgccagcctatatcttttaactgggaaatttaattcatttacatttaaggttattatttgtaggtgagaacttactcctgtcattttgttaattggtttttgataagtttttgatatcctttgttcctttctttctctcattgcttatcattgcagtttggtagttttctgtagtgataatgtttgattcttttctcttacttctatgtgtatttgctccaccagtgaattttgtagtttcatgtgttttcattatgatagttattgacatttcacttcaatgtgtagcactcctgtaagcattgctttgtaagattgatctagtgatgatgaatttcctcagtttttggttgtctgagaaaactttatttctctttcatttctgaaatacagcttttgggtatattttctttgctggcagttttttttttttcccttttactactttgaatatatcatcgaattatttcctggcctgtaaggtttctgctgagaaatctactgatagtctagtaagggttcctttgtatgtgatttgatgtttttctcttgctgtgtttagcattctctctttgtctcagacttttgacaatttgactacagtgtgcctcagagaggacctttttggttgaatctgttggaggtttctgagcttcctggatctggatgtttatctctctcccaagatttaggacgttttaaactgttatttccttaaatacattttctttttttattttattttattattattatactcttaagttttagggtacatgtgcacaatgtgcaggttagttacatatgtatacatgtgccatgctggtgtgctgcacccattaactcgtcatttagcattaggtatatctcctaatgctatccctcccaacttcccccaccccacaacaggccccagagtgtgatgttccccttcctgtgtccatatgttctcattgttcaattcccacctatgagtgagaacatgcggtgtttggtttttcgtccttgcgatagtttactgagaatgatgatttccaatttcatccatgtccctacaaaggacatgaacacatcatttttatggctgcatagtattccatggtgtatatgtgccacattttcttaatccagtctatcattgttggacatttgggttggttccaagtctttgctattgtggatagtgctgcaataaacatatgtgtgcatgtgtctttatagcagcatgatttatagtcctttgggtatatacccagtaatgggatggctgggtcaaatggtatttctagttctagatccctgaggaattgccacactgacttccacaatggttgaactagtttacagtcccaccaacagtgtaaaagtgttcctatttctccacatcctctccagcacctgttgtttcctgactttttaatgatcgccattctaactggtgtgagatggtatctcattgtggttttgatttgcatttctctgatggccagtgatgatgagcattttttcatgtgtcttttggctacataaatgtcttcttttgagaagtgtctgttcatatccttcgcccactttctgatggggttgtttgtttttttcttgtaaatttgtttgagttcattgtagattctggatattagccctttgtcagatgagtaggttgcgaaaattttctcccattttgtaggttgcctgttcactctgatggtagtttcttttgctgtgcagaagctgtttagtttaattgtatcccatttgtcaattttggcttttgttgctattgcttttggtgttttagacatgaagtccttgcccatgcctatgtcctgaatggtaatgcctaggttttcttgtagggtttttatggttttaggtctaacatttaagtctttaatccatcttgaattaattttttgtataaggtgtaaggaagggatccagtttcagctttctccatatggctagccagttttcccagcaccatttattaaatagggaatcctttccccattgcttgtttttctcaggtttgtcaaagatcagatagttgtagatatgcggcattatttctgagggctctgttctgttccattgatctatatctctgttttggtaccagtaccatgctgttttggttactgtagccttgtagtatagtttgaagtcaggtagcgtgatgcctccagctttgttcttttggcttaggattgacttggcgatgcaggctcttttttggttccatatgaactttaaagtagtttttttccaattctgtgaagaaagttattggtagcttgaaggggatggcattgaatctataagttaccttgggcagtatggccattttcacgatattgattcttcctacccatgagcatggaatgttcttccatttgtttgtatcctcatttatttcattgagcagtggtttgtagttctccttgaagaggtccttcacatcccttctaagttggaatcctaggtattttattctctttgaagcaattgtgaatgggagttcactcatgatttggctctctgtttgtccattattggtgtataagaatgcttgtgatttttgtacattgattttgtatcctgagactttgctgaagttgcttatcagcttaaggagattttgggctgaggcaatggggttttctagatatacaatcatgtcatctgcaaacagggacaatttgacttcctgttttcctaattgaataccctttatttccttgttctgcctaattgccctggccagaacttccaacactatgttgaataggagtggtgagagagggcatccctgtcttgtgccagttttcaaagggaatgcttccagtttttgcccattcagtgtgatatcggctgtgggtttgtcatagatagctcttattattttgagatacgtcccatcagtacctaatttcttgagagtttttagcatgaagagttgttgaattttgtcaaaggccttttctgcatctattgagataatcatgttgtttttgtctttggttctgtttatatgctggattacatttattgatttgcgtatattgaaccagccttgcatcccagggatgaagcccacttgatcatggtggataagctttttgatgtgctgctggatttggtttggcagtatttgattgaggatttttgcatcaatgttcatcaaggatattggtctaaaattctcttttttggttgtgtctctgcccagctttggtatcaggatgatgctggcctcataaaatgagttagggaggattccctctttttctattgattggaatagtttcagaaggaatggtaccagttcctccttgtacctctggtagaattcggctgtgaatccatctggtcctggactctttttgattggtaagctattgattattgccacaatttcagctcctgttattggtctattcagagattcaacttcttcctggtttagtcttgggagggtgtacgtgtcgaggaatttatccatttcttctagattttctagtttatttgcatagaggtgtttgtagtattctctcatgatagtttgtatttctgtggaatcggtggtgatatcccctttatcgttttttattgcatctatttgattcttctctctttttttctttattagtcttggtagtgatctatcagttttgttgatcctttcaaaaaaccagctcctggattgattaattttttgaagggttttttgtgtctctgtttccttcagttctgctctgattttagttatttcttgccttctgctagcttttgaatgtgtttgcttttgcttttctagttcttttaattgtgatgttagggtgtcaattttggatccttcctgctttctgttgtgggcatttagtgctataaatttccctctacacactgctttgaatgcgtcccagagattctggtatgttgtgtctttgttctggttggtttcaaagaacatctttatttctgccttcatttcgttatgtaccctgtagtcattcaggagcaggttgttcagtttccatgtagttgagtggttttgagtgagtttcttaatcttgagttctagtttgattgcactgtggtctgagagacagcttgttataatttctgttcttttacatttgctgaggagagctttacttcccagtatgtggtccattttggaataggtgtggtgtggtgctgaaaaaaatgtatattctgttgatttgtggtggagtgttctgtagatgtctattaggtccacttggtgcagagctgagttcaattcctgtgtatccttgttaactttgtctcgctgatctgtctaatgttgacagtggggtgttaacatctcccattactattgtgtgggagtctaagtctctttgtatgtcactcaggacttgctttatgaatctgggtgctcctgtattgggggcatatatatttaggatagttagctcttcttgttgaattgatccctttaccattatgcaatggccttctttgtctcttttgatctttgttggtttaaagtctgttttatcagagactaggattgcaacccctgcctttttttgttttccatttgcttggtagatcttcctccatccttttattttgaacccatgtgtgtctctgcatgtgagatgggtttcctgaatacagcacactgatgggtcttgactctttatccaatttgccagtctgtgtcttttaattggagcatttagtccatttgcatttaaagttaatattgttgtgtttgaatttgatcctgtcattatgacgttagctggtgattttgctcattagttgatgcagtttcttcctagtctcgatgttctttacattttggcatgattttgcagcggctggtaccggttgttcctttccatgtttagtgcttccttcaggagctcttttagggcaggcctggtggtgacaaaatctctcagcatttgcttgtctttaaagtattttatttctccttcacttctgaagcttagtttggctggatatgaaattctgggttgaaaattcttttctttaagaatgttgaatattggcccccactctcttctggcttgtagagtttccgccgagagatccgctgttagtctgatgggcttccctttgtgggtaacccgacctttctctctggctgcccttaacattttttccttcatttcaactttggtgagtctgacaattacgtgtcttggagttgctcttctcgaggagtatctttgtggcattctctgtatttcctgaatctgaatgttggcttgccttgctagattggggaagttctcctggataatatcctgcagagtgttttccaacttggttccattcttcccgtcactttcaggtacagcaatcacgtagatttggtcttttcacatagtgccatatttcttggaggctttgttcatttctttttattcttttttctgtaaacttctcatcttgcttcatttcattcatttcatcttccatcactgataccctttcttccagttgatcgcatcggctcctgaggcttctgcattcttcacagttctcgagccttggctttcagctccatcagctcctttaagcacttctctattggttattctagttatacattcgtctaagtttttaatcaaagtttttaacttttttgcctttggtttgaatttcctcctgtagctcggagtagtttgatcgtctgaagccttcttctctgaactcttcaaagtcattctccatccagctttgttccgttgctggtgaggaactgcgttcttttggaggaggagaggcgctctgctttttagagtttccagtttttctgctctgttttttccccatctttgtggttttatctacttttggtctttgatgatggcgatgtacagatgggattttggtgtggatgtcctttctgtttgttagttttccttctaccatacaggaccctcagctgcaggtctgttggagtttgctagaggtgcactccagaccctgtttgccttggtaccagcagcggtggctgcagaacagcagtttttcatgaaccacgaatgctgctgtctgatcgttcctctggaagttttgtctcagaggagtacccagccgtgtgaggtgtcagtctgcccctactggggggtgcctcctagttaggctgcttgggggtcaggggtcagggacccacttgaggaggcagtctgccccttctcatatctccagctgcgtgctgggagaaccactgctctcttcaaagctgtcagacagggacatttaagtctgcagaggttactgctgtctttttgtttgtctgtgccctgcccccagaggtggagcctacagaggcaggcaggcctccttgagctgtggtgggctccacccagttcgagcttcccggctgctttgtttccctaagcaagcctgggcaatggcgagcgcccctcccccagcctcgctgccaccttgcagtttgatctcagagtgctgtgctagcaatcagcaagactccgtgggcgtaggaccctccgagccaagtgcgggatataatctcctggtgtgccgttttttaagcccgtcggaaaagggcagtattagggtgggagtgacccaattttccaagtgccgtctgtcacccctttctttgactaggaaggggaactccctgacccctcgcgcttcctgagtgaggcaatgcctcgccgtgcttcggctagcgcacggtgcgctgcacgcactgtcctgcgcccactgtctggcactccctagtgagatgaacccggtacctcagatggaaatgcagaaatcacccctcttctgcgtcgcttacgctgggagctgtagaccggagctgttcctatttggccatcttctccttaaatacattttctatgccttttcccatctcttctcctttttgaacttccataatgtgaacatttgttcactttatggtatcccataagtcctgtaggctttcttctttctttaatttcttttcttttcttctcctttttttttggtctgcctgggttatttcaaaagatctgtcttcacattcagacattgtttttctgcttcatctagtctgtcgttaacaaattcagttgcatttttatttcattcattgaattcttcatttccaagatttttttaatgaaatctaaatcattgttgaatgtttccttcagatcatgtattgttttcctgattttattgaatttcctgtttgattactttatatctcactgagtttccttaagatcattatttttgaatttgagggacagagagctagcaaacaagcacattcacattactttattacagtaattgctataattgttatttttattagttattgttaatctcttactgtgcctaatttataaattaaactttattatatgtacgtaggtgtaggaaaaaacatagtgtatacagggttcagtaccattgcggtttcaggcatccactgggagtcttggaacgtatctctgtggataagagtggtctactgtactcttggtttatgttctgggaggtaaactgctcacttatgaccacatccaagtgcatacactccattttggaaccctctagcacacagccatgcgtacaggttggtgcaaaagtaattggcattgaaagaaatggccaaaaccgcaattacttttgcatcaacctagagatgtactacttttctattgttgcataactcgttaacattaataactgattcattatttcccaattctataagtcagaagtctgggtgggcttggctgatttttctgccctggatctcacaaggctgaaggtaaggtgctggctgggctcttaatctggagatctggaaagattgacttcctagttcattgaggctgttggaagaattcagtttcatatggttatgagactgaggtcccccctgccttgctggttgtccttgtcccttgcatgtggtcccctccaccttcaaaaccaccaaccgtgtgttgagtccttcttgtgttttgaatctctctgactttctcttctgccaccagccagggaaaactctgcttttgaatcgggttcacatctccgtattttaaggtcaactgactcaagactttaatttcatctgcaaaatacccctagattagtgtttgaataatcaagggataggaatcttggatgggaccattttcagaattctgactaccacagtgagtgttgtataaatttttttttgatgtttaatcaaggagagaattggaaaaaagtactaaaagaagtctcaaattaatttttacactgttaaattcaggattctttctatatgatatcactgttaatgctggttataccacccattgttgtaaagaaacccacaagctaacagagaaaaggaaaacaaaacagtaattatgctgatgttgttgccttttttatttttggaaggaaggaaaatttgctgatccgagccaagtttttcccctcaatggctggcgctgctcagtaacattgcaagtgttattcatatattgtgtttatttttttcaggggcctgggcaacaaagttacttacttttttaaaaaagaaaaatggacttaaacatgtggaaaagttcaaaagaagaagcttagtatgactgatataaaatagttgtaaaaagtgaccaatctcattataatgttgtgatttctaggctgcgttgagttttgttagttgcctaacactgtataattataagtatagctagaaaagtgggtgtccttcaaaactttgggacagttggttgggattttgtaggcaatccagtgttgaaaggtttgcttcatcattttgtggtgttatctttgggttgagaaacaaagatcatttaaaaagaaaagttcagatggtcctgctgggttctgctgtgctgtggcttatagcctacttgctggaagtaccattcagttctcaatactaagaatcaactttaagtaacttttaaacttaaaagttaaatattttttggtatgtcgtctttgagtgagaagaccagggtgggattttttccatatcagacaaacaacaataggggtcctggctggcaaaaggatacacatcattgcgtcagatgatttgtctccaggaaaataagttcaaagcaaagcatcaaatgctgtctgaatgtgagtctaaccaactgggactggtaagaggcaccaactctgtgtgctgcccttgacagcccacatgggctcccttctgtgctgtgaactgtaaagtgtgaccagggaactgggaagagtcttggaaatacatcaatgctgcctgaacccacttaggctcatggaagtggaaaggacacagtaaaagagaaagagaagctcagggattgccaagtaacagatattgagtcagcaatgatgggtctcaagtcttagcttgattgagacttgggcaagccattgtgagacttagggcaagttgcctcgcctcatctctgtgagtctggtgtcctcatctgcaaaatggagataatatctgtcatttagagcaacatgggtgaatctggagacattatattgagtgaaataagccaggcacataaggaaaaatactgcatgatttcagtcatatatggaatgtaaaaagttgttctcatagaagtagagggagaatagtggttaccagaggatgggagggtacaggggaaggaggagtggggagagattggttgataggtacgaactacagttaggaagaataaatgcttgtgttccattgcatagtaggatgattagaattaagaatgacatattctatatttcaaagtagctggaagagaggttttgaaagttcttatcacaaagaaatgatgaatgtttgaggtgatggatatggtaattatgctgattttgtcattacacagtgtatgcatgtgtcaaaacatcacatcatattgtgtaaatatgtacaattatgatgtgtcaattgtacatttaaaaaattgaaacaaaaaatggagatgataataatagaagtactgcctaggtctttggatgtttctatgaagtgatacataaaaagcatgtagcaggttctcttggaggtggctggcaagatggccaaatacaaacaactccagtctgcagcccccagcgagatcaacgtagaaggcgggtgatttctgcatttccaactgaggtaccaagtcatctcattgggactggttggacagtgggtgcagcccgtggagggtgagctgaagcagagtagggctttgcctcacctgggaagtgcaaggggttggggagctccctcccctagccaagggaagccatgagggactgtgccgtgaggaatggtgcattccagccagatactatgcttttcccacagtctttgcgacctgcagaccaggagattccctcgggtgcctaggccaccagggccctgggtttcaagcacaaaatggggcagccgtttggtcagacactgagctagctgcagtttttttcatgtccccgtggcgcctggaatgccagcaagacagaaccgtttcccccctctggaaagtgggctgaagtcagggagccaagtggtctagctcagcagatcccacccccacggagtccagcaagctaaggtccactggattgaaattcttgctgctagcacagcagtctgaagtctacctgggatgctcaagcttggtggggggaggtgcgtctgccattactgaggcttgagtaggtggtttacccctcacagtgtaaacaaagctgctgggaagttcgaactgggtggagcccactgcagctcagcaaagccactgtagccggactgcctctcttgcctcctttctgggtacgacatctctgaaagaaaggcagcagccccggttaggggcttatagatcaaactcccatctccctggtaaagagcacctgggggatggggtggctgtgggtacagcttcagcagacttaaatgttcccgcctgccggctcttaagagaacagcccatctcccagcacagtgcttgagctctgctaagggacagactgcctcctgaagtgggtccctgaaccctattccccctgattgggagacacctcccagcaagggtcaatagacacctcatacaggagagctctgactggcatctggtgggtgcccctctgggacgaagcttgcagaggaaggaacaggcagcagtctttgctgttgtgcagcctctgctggtgatacccaggcaaacagggtctggagtgcacctccagcaaactccagcagaccttttgcagagggacctgactgttagaaggaaaaccaacagaaaggaatagcatcaatatcaacaaaaaggatgttcacacaaaaacctcatccgaatgtctgtcaccagcatcaaagaccaaaggttgataaatccatgaagatgaggaaaaaccagtgcaaaaaggctgaaaattccaaaaaccagaatgcctcttctcctccaaaggatcacaacgccttgacagcaagggaacaaaactggatggagaatgagtttgatgaactgacagaagtaggcttcagaaggtgggtaatgacaaactcctctgagctaaaggagcatgttctaacccgatacaaggaagctaagacccttgaaaaaaggttagaggaattgctaactagactaaccagtttagagaataacataaatgacctgatggagctgaaaaacacagcacgagaacttcatgaagcatacacaagtatcaatagccaagccgatcaagcggaagaaaggatatcagagattgaagatcaacttaatgagataaagtgtgaagacaagattagagaaaaaagaatgaaaaagaaggcaaaaagcctccaagaaatatgggactatgtgaaaagaccaaacttacttttgactgatgtacctgaaagtgatggggagaatggaaccaagttggaaaacactcttcaggatattatgccggagaatttccccaatctagcaagacaggctaacattcaaatttaggaaatacagagaacatcacaaagatactcctcaagaagagcaaccccaagacacacaaatgtcaaattcaccaaggttgaaatgaaggaaaaaatgttaagggcagccagagagaaaggttgggttacccacaaaaggaagcccatcagaataacagcagatctctctgcagaaaccctataagccagaagagagtgggggccaatattcaacattcttaaagaaaagaattttcaacccagaatttcatatccagccaaactaagcttcataagtgaaggagaaataaaatcctttacagagaagcaaatggtgagagattttgtcatcaccaggcttcccttccacgagctcctgaaggaagcactaaatatggaaaggaggaaaaactggtaccagccactggaaaaacatacccagttgtaaagactatcaagtctatgaagaaactgcatcaattaatgggtaaaataaccagctagaatcataatgaaaggatcaaattcctacataacaataataaccttaaatgtaaatgggctaaatgccccaattaaaagacacagactggcaaattgggtagagtcaagacccttcagtgtgctgtattcaaaggcacccataggctcaaaataaagggatggaggaatatttaccaagcaaatggaaagcatgaaaaaagcagaggttgcaatcctagtctctgataaaacagactttaaaccaacaaagatcaaaaaagacaaataagggcattacataatggtaaagggatcaatgcaacaagaagagctaagtatcctaaatatatatgcacccaatacaggagcatttagattcataaagcgagttcttagagacctacaaagagacttagactcccacacaataataatgagagactttaacataccactgtcaatattagatcaatgagacagaaaattaacaaggatattcaggacttgaactcagttctggaacaagcagacctaatagacatctacagaactctccaccccaaataaacagaatgtacatccttctcagcaccacatcacacttattctaaaattgactatgtaattggaagtaaaacactcctcagcaaatgcaaaagaacagaaatcagtttctcagaccacagtgcaatcaaattagaattcaggattaagaaactcactcaaaaccacacaactacatggaaactgaataacctgctcctgaatgactactgggtaaataacgaaatcaaggcagaaatatataagttctttgaaaccaataagaacaaagacacatcgtaccagaatctctgggacacatttaaagcagtgtgtagagggaaatttatagcactaaatgcccacaggagaaagcaggaaagacctaaaatcaacaccctaacatcacaataaaaagaactagagaaacaagagcaaacaaattcaaaagctagcagaagacaagaaataactaagatcagagcagaactgaaggagatagagatacgaaaactcttcaaaataatcagtgaatccaggagctgtttttttaaaagattaacaaaatagctagaccactagccagactaataaataagaaaagagagaagaatcgagtagacataataaaaaataataaaggggatatcaccgctgatcccacagaaatataaactaccatcagagaatattataaacacctctacacaaataaactagaaaatctagaagaaatgcataaactcctggacacatacaccctcacaagactaaaccaggaagaagtcgaatccctaaacagagtagtaacaagttctgaaattgaggcagtaatagactaccaacgaaaaaaagtcctggaccagatgaattcacagctgaattctaccagaggtacaaagaggagttggtaccattccttctgaaataactccaaatgatagaaaaaaagggactcctccctaacatattttgtgaggccagcatcatcctgataccaaaacctggcagagacacaagaaaaaaagaaaatttcaggccagtatccctgatgaacatcgatgcaaaaatcctcaataaaatactggcaaaccaaatccagcagtacatcaaaaagcttgtccaacacgatcaagttggcttcatccctgggatgcaaggctggttcaacatacacaaatcaataaatgtaatccatcacataaacagaaccaatgacaaaaaccacatgattatctcatagatgcagaaaaggccttcgataaaattcaacaccccttcatgctaaaaactttcaataaactaggtgttgatggaatgtatctcaaagtaataagagctatttatgacaaaccacagccaatatcatactgaatgggcaaaaactggaagcattccctttgaaaaccaacacaaccctctctcaccactcctattcaacatagtattggaagttctggctagggcagtcaggcaagagaaagaaataaagggtattcaaataggaagagaagaagtcaaattgtgtctgtttgcagatgacatgattgtatatttagaaaaccccatcatctcagcccaaaatctccttaagctgataagcaacttcagcaaagtctcaggatacaaaatcaatgtgcaaaaatcataaacatttctgtacaccaataatagataaacagagagccaaatcatgagtgaactcccattcacaattgctacaaagagaataaaacacctaggtatacgacttataagggatatgaaagacctcttcaaggagaactacaaaccactgctcaaggaaataaaagaggacacaaatagaaaaacattccttgctcatggataggaagaatcagtatcgtgaaaacggccataatgcccaaagtaatttatagattcagcgctgtccccatcaagctaccgttgacttttttcctagaattagaaaaaactactttaaattttgtgtggaaccaaaaaagagcccgtatagccaagtcaatcctaagcaaaaagaataaagctggaggcatcatgctaccttacttcaaactatactacaagactacagtaaccaaaacagcatggtactggtaccaaaacagatatatagaccaatgaaacagaacagaggcctccgaaataatgccgcacatctagaaccatctgatctttgacaaacctgacaaaaataagcaatggggaaaggattccctatttaataaatggtgttgggaaaacttgccagccatatgcagaaaactgaaactggatcccttccttacaccttataaaaaaattaactcaggatggattaaagacttaaacagaaaacctaaaaccataaaaaccctagaagaaaacctaggcaataccattcaggacataggcatgggcaaagacgtcatgactaaaacaccagaagcaatggcaacaaaagccaaaattgagaaatgagatctaattaaactaaacagcttctgcacagcaaaagaaactaccatcagagtgaacaggcaacctacagaatgggagaaaagttttgtaatgtatccatctgacaaaggactaatatccagaatctacaaggaacataaacaaatttacaaggaagaaacaaacaaccccattaaaaagtggatgaaggaaatcaacagacacttctcaaaagaagacatttatgcggccaacaaacatatgaaaaaaagctcatcatcactgatcattagagaaatgcaaatcagaaccacaatgagataccatctcaccccatgacgatggtgccatttagaatggcgattattaaaaagtcgggaaacaacagatgctggagaggatatggagaaataggaatgcttttacactattggtaggagtgtaaattagttcaaccattgtggaagacagtgtggttattcctcagggatctagaaccagaaataccatttgacccagccatcccattactgggtatatacccaaaggattatgaatcattctactatacagacatatgcacgcatatgtttattgcagcactattcacaatagcaaagacttggaaccaacccaaatgcccatcagtgatggacaggataaagaaaatgtagcacatatacaccatggaatactatgcagccattaaaaaggatgagttcatgtcctttgcggggacatggttgaagctggaaaccatcattctcagcaaactaacacgggaactgaaaaccaaacactgcatgttctcactcatcagtgggagctgaacaatgagaacacatggacacagggaggggaacatcacataccggggcctgtcagggggtgggggcctaggggagggatttcattaggagaaatacctaatgtagatgatgggttgatgggtgcagcaaaccactatggcacgtgtgtacctgtgtaacaaaccttcatgttctgcacatgtatcccagaacttaaagtataataataactttaaaaagcatatagtagaccacctggcatgcaagtacttagcaaattttggctataattgaagaaggagcttcattaaaaaaggaagaaggaaagattaagagagagagaaataagagaaagaaggggaagagggaaaatgagaccatcaggaacaaacagaagaaggaggctggtctaggtcccaggattccatgcacttagaaaaataaggcaagtttgaattgaactttttcatttttcaagtgaagttgagttctcggatatacactctgctgcatacttccctccacaatgctgagttttaatatcatttggttgaagctttgagatactgggccgaaatagcttccagaatgcctctgtaatccagtggtgatattagtgaggcctaggaaatcattttatagccactagtctttttatttgtaaatttattctacactgaaggtgttagcatcaaacttttcaccctgactgagcacagactcttgggagaactgaaatctaagtaagagattaccttgcacattgcgtcaagtcagggatgaatgaagcaacttaggcgacagaaattatcctggtggagcctgagacctgagactaaaggctgagggtgtgctttggtctcaccaccaagctttgctggtgaattctctaccaccatagctgtcccttttgtgagttgcaaaggaaagaatgttctctgtgtgcaacaaatagtcctgatttaatctggggcagaaaatcccctagctttgccagtgatctgcttgttggagaataaaataattgaattatctccctgggcaaaagcaaatggcatggaaagtctcaattgcagcaagaggaaaaataagaataagggactgttttgctttgttttattttgagcttttggtactgaattccatttatttagaacaaatgaagaaatcttcttttaagaaagttagtcaacatacttgggaggtctcatcagtttctttgggttcttcttgggatgatgggagagctgctgaagttcccttcccccaagatcaactattagtctctgcctataatgctgtctacaatcagccttgccctaagagtcaaactgcttgccaagttatgcgtccctctcccagctttattgagacataattgacaaataaacaaataaacattgtatatatttaaggtatacaaagtgatgttttgatatacatatacattacaaataacatatccatcttctcacatggttaccatttgtgtgtgtgtgtgtgtgtgtgtgtgtgacagagagagaggaaaacactgaagatctactctcaacaaatttcaggtattcagtgcattagtattaactattattgccatgctgtaaattaggtctgcagaactcactcatcatataactgtaagtgtgtatcctttgaccaacatctcccccttttctccactctcagcccctggcaaccatcattctgtgttactgtaagtttgatttttttttttttttttagatttcacatataagtgagatcatgcagtatttgtctttctgtgcctggcttgtgaaacttagcataatgtcctcctggttcgtccgtgttatctcaaatggtagcatttccttctttttaaaggctgaataatattcatatatatgaatattatattaattatattaatatataatattcctgcgtgtgtgtgtgtatatatatatatcacatatatcacattttttttatccattcacctgccaatgcacatttaggttgttttcatatcttggccactgtgaataatgctgcaatgattgtgggtgtgcagctgtctctttgagatagtgatttactcccttttgatatacacccagaaatgagattgctggatcatatggtagttctagttctgtttttttgaggaaccaccacactgttttccatagtggctgtactaacttacattcccaccaacagtatacaagggtcccttttctccccctccatgccaacacttgttaccttttgactttttgataatagccattctaacgggtatgagatgttacttctttgtggttttgatttgcatttccctggtgattagtgatgttgatcacctttccatatacctgatgaccatttgtatgtgttctttgttcaaacgtctgttcaggtcatttgcccatttttaaactaggttgtttgttttcttgctattgagttgatatgagtttcttatctatcttgggtattaaccccttattgaatatatggtttacaaataattttgtatggatttgaaggcagtttcacaaatttctaagacatcaataactttattttatgttaaagatccaagtggttagtgtgatagaccatggacacctgttccatatctggttgtaaagaaacagtagataccatggtagtttcatggctggataccctcatcagtgggtggagagaggaggcttgggctttgtagggaaggtcagcagagaccagcctaaggcatgactcatactagtcactgtggagatatttgttgaccagtaaatactatcaagataacttgggcttgtgggaatgataccaacagataattctcatggggtattagctcatatgtaaagtgatgagatgggtatctggcatagagtacctataacctaagaggaaagaactatcctttttttttttcagatggggtaaatgaggcccataatgaattagcagcttggccaaggtcgttgcgggaaaacttagtaagtcgccaagcagtgattggaagccatgcattgcgaatctaggacatggatatttatcctccggagcagactgcctcccgttacagtgtatttaaaacttaacagtcatcacttcctccaccccagcctgcttctcttcttgtgtttccccaagaacagccccagcacccactcattgacacaaaccagaaatttggggagcatctttgacttgccatctccctgggcccccacattaatcattcccagagttttctccattgtcaaatccccattctctcctcacctgtccatttctctccacctccaagtctgctatcttgatttaagtcatcatgatctcctccctgaatctctgcctccctctcctggcttgtcctctggctccaggtgtctgtcttccaaccacatcttcacacggagatcagatttctcctagagaaatttttggacttcacatttgaccctctctgaggttaaaactccttggtggatcctcagtccatggctggagcagtttttcccgtggtgtaccctcttgtacttgatcatttatgggtggtagagaggagttagggcaggatattcacttgggatattgaactaacagttgctttctttcaattaacccctctgacaacctcaggaggaaagtcttaattcactattaatatgtcttcaacattttcctcatttttgcttatctccatttttaaccaagacagagcaggcaactatagttagctagaatgccactacttatttttattctatttttatgatttctttttactttatggctcatgatacaagttttccattttctgggaatgctacaaagttatcttttagaaggagtatatttaaatttaaaaataacagcataataaaaaatttaattaatgactagagcaagtgatataatacagtagccctctttgtatctgcagtttcagttatctgaggtgaaccatggtctgaaaatattacatggcaaattccagaaataattcataagtttaaaactgcagccaggcgcagtggctcacacctgtaattccagcagtttgagaggccaaggcgggaagatcatgaggtcaggagattgagaccatcctcgctaacacggtgaaaccctgtctctactaaaaatacaaaaaattagccaggtgtggtggcaggcgcctgtagtcccagctattagggaggctgaggcaggagaatggtgtgaacctgggaggcggagcttgcagtgagccaagattgcaccactgcactccagcctgggcaacagagcgagactctgtctcaaaaaaatatatatataaatatgtgtgtgtatatatatatatatatattgcttgtcattctgagcagtgtgatgaatctcgcatcttcaatgtgcatcttccctttgtcaggtgtatccacgctgtctacactactcacccattagtcaggcggctcaattatcagatctgctgttgtggtatggcagtgcttatgttcagataacccttattttacttaataatgcttttctaataattacttattacttattgttaatctcttacattgcctaatttataaattaaactttatcattgatatgtatatatataaaaaacccatctcatatataggtgatatgatttggctatatccccacccagatctcaccttgaattgtagttactgtaactacatgtgttaccataacacatgtgttgtgggagggacccagtgggaggcaactgaatcatggagcggttacctccatgctgttctcttgatagtgagttttcatgagatctgatggttttataagaagcttttccccctttgctcggcacttctccttcctgcagccatgtgaagaaggacatgtttgcttccccttccactgtgattgtaagtttcctgaggcctctccagccaagctgaactgtgagtcaattaaacctctttcctttataaattacccagtctcaggtatgtctttattagcagcgtgagaatgaactaatacaatagggttcagtactgttcatgatttcagacattgactgggagtcttgggacatatcccctgagaatgatggaagactacttcacagcgaaaattgatcatagcagaagaaatatggaagttttggaaaccgtaattataggcctttctggaacctgcttcctgcttgtgttgccagccttaactcttccatattttccttattttaaattgctactgaaaatgatgaagtcctgagcttggcagtggctcccacctttttctccctcccttcttggagacatcagaaaccgataggagagaaggctacacattagtctgtgtgtcctgcagccatagaaatgtcatgacagacacaattttactatacagtttcatggaaagaagttatttaagcacttatcaaatatgtggccaaacacttgaaagcaaatgattaaatgatgtatttaaatattttatagtaaagcatgctcagtgggcagctattagtcaaatttttacaggtattcatttaagcaaaatcataccatcttttgaatctgggaaatccagctctacttagtagcctgttttacccttttggagttgattctgtaaaaatccaggagaatttcttctcctctcaatctttagccaaaatatgagaattgtaggaaattgctcatccccaaactccatgtgcctgcacatgctcacacaagtcgaatctgtaataggacttaaaactctcctgtcccagcactttgggagtctgaggcaggaggctcaattgagcccaggagtttgagaccagcctgggcaacatagtgagaccctgtctctacaaaaaaaaagaaggaaagaaaacttcctcctgaatgctaaaggtgtgctacaggtgttcctcctcaaataattgcactgaaatcactgaccctcaggatgtatttctttgatttttcatcatgccttttcctgggggtctgcagggaacataccattgttgagatggttgcttggtacagagccatgtggatctgcagcccctcaccctacaccccacagtcgcaagttctttacttcttagatcacttcgttgtgttttctccccatattttactgtcttgggtcatcaccaacgtgatttttagttcccctgtagtagtaaatacatgtttcagttactgaaatgagggttttatgataagaaaaatcataaaagcaggggtcacaaacaagttaaagaatataaaatatgtatgaaatttttaattgaaaaatgggcctttctgtaatataatgatagtggctggccaacttgggctgccttcctccttctagagatatttctattttatctccatttgggggttcttttggtggaaaacatgggcttgtatttccatttaccactctgctggatggtgttaaatgcctggaaagcctgggaagactccagaatctgaaatgtatgaaagctgggagggaactcttagggtcatctggtggaaattcctttgtgacagatggggaaacagaggtctagaaagttgaagattcatccagaaaaagaaaacaatccatagaagaatgtccaagccttctcactcataggcctgaggttattcctctctataatgaccacaggagtccctgggtcctgggacactctctgattctgtatgtctttgtctctgttggggagaaccagcaaggtttggagatgcctgcttcctgagggccctgaaatccatggagatggactgactgcccttctgctagtgcttctaggaaggggaatgtagaggtcaaacatgaaagagtggcctctggctaggctgcctctagataatgaaacagtaaggacatttgttgagaagccacacatgtattttgtcttccaaagctttgggacattcatcagctttcctcaaaccttcactcccctctgatgtttcatttgcacagccaaagtggagttgtgtttccagtgtgttcctgggatgccttcaggatttcttggaaaccttaagcagatggttaagttgtgtgatctccatttccagcctctggaaaacctgtggctaatattccacaatggccctggaatttggggtggcttctcagtgacctggcttccgtggcttctctggcaaagatcaaagacttcaaaacagttggagcgtgtgaaatgattggtaactgtgctcggttcttccacagctatttgttcttgcaagcccaggctttacatctttttccaaaaagtgtacacggccttcattctccagagcggttgaaaagctaatagacattctcattttattccacccctgactacaggcaactctatcactagatgagtttgtctgaattccatttgcttaggctttatgaagtgaataaatttgaattaatgtggagctttctgaggagggggaagatatgctttgagaggttaagcaatgtctgtgttagtttatataaatgaatctttatgggtgcaaatgtgctcacaccacgttaccatattggctctattagtttatacagaaatttcattaagtgatgtgaaaatatacatatggggatttctacaatgacttcttccttttgaacagccagatatttacgttcctttgggtttcattggcacacaaatgtattttccctcttaaaggtaacacttggaagaaatatgcatcaagaaatatgtctataacaactcaaattcccaacaaattacatttgctatatttggtaactctctaacagtgtttctttccataataattgaagcagaattgagatgtcataaccgaaactgatactgcagacgcagttgttacttgggagcagaggaggggcagtgagaagcatttggcttttctgtaagttgaaatttttgttgttgtatttttatctgtaaatgattaggaatggaactgtggtgcgtaaactcatgaatgttaatatggctatagcttctgcttccgtaacacttagttattctatcccttattacactcttacagacgttgatagttcaacaattggagcttttaaactaatggaaggctttcaaccaagtagaatgccttcattactagcaagcagggagatctgaatgtgaattgaggtggtttaaaccaatttaaggaaacatttttataaaagactaatgcccataatttatgtttattttctgttttctgtgatttgaataaattagggcagggatttatattatttgtcttcttttcacatgcctcacccagtgcccacctgcattagtccatgatagctctgataacaaacaaaccagaaacctcaggggattcacacattgaagtttatttcttgctcatgtaaatgccactgggtctcggagctctccaggcagttcctttccaacgagtgactcagggacctaggcacctttcatcctgtagccatgtcatttggaaaatgtagcttctggaattactacaaggggaagagagaatgtgggagactcatagccccctctcctgtactttagataggaagtgacacacatcacttctgctcacaacccattggccaaaccagtcacatgcccaacaccaattacaagggatgctgggaaatgtagcagagtgcatggaacactctgtgagcattactgttcccaccaccttaacatgtcgcaggggcctagcaaatgctaattgagagaatgaatgaatgaatgaatgagtgatgaatccttttaaatggcttggcattgagagcatgcgattgctattttaaattaattgaaaaaggatagaaaattgctggaggaatattaaccttgagggctttttgcataaatttgcactttttgtatgcatttgctgtaagagcttgttgcgtaagtctaaatgccacacaatgatttttttttgaggtcttgatgcacagagcctaaaaaaattttgtttttgaccctaaaggcttctaaagcaaacagcatcttgcagttgattaggtggaagtgtttcttagcctttacggggtgcatggtgggaacagaccttgttaaggttacatagaaggttaacctccattgacaagacaaaattgaagttgttttctcttgccacagagcagttccccgatctgtattgtcagcacagaagagtttatccgttttctccagagcattatctcaaatgaagtgtcaaggcactaaatggatttaccttcttgtattattttttattttgatgtttaattttttatcctatttatttattgtcatatgaagttaaaacaacaaccacaaaaataaatagggaagtctgagagagaaaaatatcacagtctcaccatctttcaccttgtttcttagtagttgttgcaaaacccataaggaatgtcattgtgttgtaatttctaatttttgtttccttgacttatgacttctcatttctgtaacttattgtaattcagataataggtcaactcattcaaacatattcagaacacctactaaatacaagacaatgtatgatataggtatattgtaaataaatgactgcttttctataagatattgttaaattgaagttctggaaagttgcccggagcaactcacctggagtaagcactgaaattgttcacatcaggtttcaagcatagattctgtcacctcctagctgtaggaccttcagatggttatgtaatcatgttgtgctgcagtttccttatggggtgagatgggtaggagggtttgagtaagacctcaagaaaccctaagcaatgaaacactacggtactcccagcatatcacccttaatgtaactttaaataacatggccattttttaaaaaggacacaggaactacataacattttttttcagattttggaaaattctaaatatgtctagaaaaacttttctttctgttccattctccttcctattctccatgaccccctccccgcggactgtatcaggtacagcctgttggaaatccagcaccgcacattaggcacaccagtggtaagtttacttgttgagttatcaccttttttttccttttaatcagagaggcagctctgtgttgaagatgctaggtagtgatggaaaagacattaggaaaatttgttaccgtggtaaccggggatggacatcatgaccttttgtgatatgcatgctgtggccttggtagtctcttcccctaattaacatcctgtgagaaacgtgagagtaaatcaccggggcaactggaccactgcgatattaagtgtgagaacattctaaatggcaataataatcatgataatgaggccacatattctgtgtctatcttttaattgcttcttaactcttgtaactggaaatggtgaagttattatgatgtggaaactaggaagtgatttatttcttacttaaattggactttgtgcagaaaccctttttagtctgttgtgaattatgagagtatgagagttcctttgaagaagaaccacctaggtagataattttttttttttttttgggggatggagtcttactctgttgcctgggctggagtgcagtggtacaatatcagctcactgcaatctctgccttccaggttcaagcaattctcctgcctcagcctcccgagtagctgggattgcaggcacctgccactacgcctagctaatttttgtaattttagtagagacggggtttcatcgtgttggccaggctggtctcgatctcctgacctcgtgatttgcccgcctcggcctcccaaagtgctgggattacaggcatgagccaccgtgcccagctcacctaggtagataattttaaatacagtttactactactaataggcaacaccaaaaatatggatttgccgtagaatcaggggttatcatcatgcttgaagtattatgctctagaacccaagtaccctggttgagccctgttctttcacattttgccactcagttttggattcaaattcataggagaattttttaacttgaaccaaggaagtctagttattggacactaaaggaactataggatggttggtcttgtaagctggctttctggtttgtacctgcaagccacatgttcagattcaacttatggttcttgagtgtgagccgtctagcaatcagtgtcatttacactgatgattttatatatgatatgttagctcagaaagtccttatgaaaaccctccatagcatagtataatagacactttttttttttttttgagacagagttgccctgtcatccaggctggagtgcagttgtgtgatcttggctcattgcaacctccatctcctgggttcaagcaattcttctgcctcagcctcctgagtagctgggactacagacgtgcaacagcacgcttagccaatttttatatttttagtagagatggggtttcaccaggttggccaggctggtcttgaactcctgacctcaattgatccacctgccttggcctcccaaagttctgggattataggtctgagtgcccggccaatatgcagcttttaaagtctctgacagactaacagtgaccccccaacagccccttcattcatgagggtgggcccaataactatgcacaacttgactcctttgcttcctgtcctgtccctgccccctgcattcctttcctaagatttgggaattgcacgaaaaatttcagcctattccgggctagtctctgaacagaaagacatagacagggagaagctgtgagtgagtagttctcttttgttctataaatgaatgggctaagaaagccagactgtaaagaggagactagtgcaaacacctggagagaagtagaaaggagaggtgagagaactttgcccaggagttggaaggcttttttgattctggttccaggcccttcctgacagctggttgcatttagtcctttgaattccatcaagcacttccatatcttaagataaattccatcacttccaaagaaatgtcttaactaaaatgagtagatgttgttgatgctttttctcctgggagaaaaactgagattcagggaagccaacctaactgcaagtgttcactgcagtgttgctgaacactttctcaggactccagcaacccaagtcaaattagaataaaaaacaaaaagggaatgtattgactcactaatctaggcgttccaagatgtgactgcctttcagtatgatttgtcaaggatttcaccagaatcatttgatcaaactttactcttccttgccagctcatgactctgtttctgttaggctttgttctcagaagaatgatctctgtgtggggcaagatgaccactggcagcccaaagcagcagcaccacatcttgtgacccttgacccagggtgcagggacctcagtctcccagcatacccagcattccctggaaaaggactgtaatgggccagcctgggtcatgtgctcttgagtggagtgtggctgacagggccctcttgattgatagcccctcttgtagtggagaatggggtttctagttctgaaacaagggaggagagatgctgagcaggccaaagcaaccttattcacagcatttgcctgtttctctacctgacaacatggtagagagagaaatgctgcttagatgagtgacgcacttccatatgctgattttctccttaggtattagtcacctccttttcctcctactctagaaaataagtcttgatgcagatgattggggatgaacttattattcacataaccttatacccactatgattcaaaaaggcagtcctgcactttgagaggccaaggtgggaggatcccttgagcccaggagtttgagaccagcctgggcaacatagtgagaccccatctttacaaaaaatgaataaaattagctgggaatggtggcatgcacctgtagtcccagctactttggaggctgagttgggagcatcgcttgagcccaggaggttgaggctgtggtggactgagattgtgccactgcactcctgcttgggtgacagagcaagaccctgtatcaaagggggaaaaaaaccagacagtcctttgcaaatgtagtacttctgtcattagtagcaacaagcatggcacatcttactgtcgcttggggacaagtcctggagtggagacttctgctcttggatccatattatgaggataagtgtgtcaacacagtttttgacacaagcctacttattcaaatcatattcgagggtctcccaacaaccaggccctggagttccaaccatgaacaagattaaaaatatttctcttcttagggagctcaagtttctaatggaggagatagacagaaagcttaggaacaattttaaacgctttagatattgaatgcaataaagaaaaaaaataggggcatgggcctgttgttcagtatggtagccacaagccatgggtggctatttaaagttaaagtaaaattaattaaaatgaaataagagtaaaaaatcagttcttcagtcacactggtgaccttcacatgctcaatgaccacatgtggctagtggctgttgtatcagacagtacaggtacagaacatgcccatcatcatacaaagtgctgttggatggggctgggcttggcagtgactggaaaggtacaggagggtgttttcaggaaaggtcttcctgtggagccagcatttgtgctaagacctgaagccacccatacaaaggtcttaggggaataggcttcgaggcaggatgaacagtaaatgcaaacattctgaaatggtaatgagctttgtctatttgaagatccaaagacggcctgtgcatctggttgagttagagagggaggaaagagctagatcaagcatgaccttgggttattccataccaatgggatgggttgcttaagcaaggtagttttatttcattttaaaaggatcattctggctgctacggggcagagggaagcaagggtagaaggagcacataggaggacttccgaaaccaactgatgaatgaaagaactgatgaaaggccctgccaggctggggtgtccattagtctgatatcttcttatgagggctttttgggtcatgatggagccctcaggggagttcctagctaccttatgaaaccctccatcatggcattagactgaacagtggcccgactagcctcacaatagcccaggcccttggactctacacagttcccctaacagtccatcctgactctctaggtcatagcttggcccactattggctgcccttagcccctctgagctcctgccgtgtcctcaggccacggtaggacattgctgaggtgggacactcccttctctctttcttcgcattccttcaacagtctctactgagtacctgttctgtactctgtattgtattagataccgagattacagtggcacaggaagaaacagctatgcttcctccaaacatgtatctcacactgtagagcagaggccctatcaactgagtaatcactcagataagtgtgcgatgacccctgggataagtactatatgggacaggctcgtgaggctccaagatccccagtcaaggagttcagaggcagctgtcctaggcacatgataactgagctgaatccaaggaggaaccaggattgtgtgagcagaaggtggagcaggtatcctgggcaaggggaccagcatggacagagaccacatgcatagagaatcatggagcaatggagctaccagcagagaccagggaggctgaatggagggagcagtggggaggtggtgctggtgtggctggccaggagggcagaggccagagtgagcagggcctcatcagccgtgctaaggatcttgtcttgtgtcctaagagcaggaaaaagtccctgaaggattgcatgctgggagatggcccactcaggttggtatttctggaagctcgctatgccataaggagatgatattgaggggcccaaagtgggtgctgagggatcagatgtgggagacgactgtgtcttcaccctggctttcagcgtttccctctgtcctctgcctgtcagtcagctccactgcaatagtgactgctgccatttgttggaaccctggtaggtagaaccacatgaacttgctggtgttcggcactttttagcccacaaaagggtagttttatacagttcaatctaatattgtgtgccaggcactgaactgagtgcttttgactttctccatttatttctctaggaaacttgactataatctgggtggttataaactcattttatagatgcggagctgagaggctgtagataaggagcagagctggggttggaactcagtgtgctggagttaaacacttcactccatggcttttagagtgaaatgcccagtggccagcgaggcctgcagaaagctgcagtggaaagccttcataagtggcttgttaagtaggccattaatacttgtatttgaattttctcaggctggagattccagatggctggaagagggctattcattacctattttttttaaaggaactgtgacacttgggggattataaatgagttaatacttagaaatattctggaacagatcattaaaaaaatcatttttcacatatgaggagaaaatgagatgattgagtagtaaccagacggcactaaacctttggagaggggcatggctgagtagcaatgatgttacttccccataggacacacatgcaccgggagctgggtgtttgtttggctcatgtagaactagtattcctactaatttttattttttaatctaagttgtaaaaagctggccatcatcccagagctgggaagaagaaaacaataaggaaaaaaggagaaaatgaaaacacattaggaacctgctgcaggcactgtgtggtgacttgtgtacattgtatcccattcgatcacagaaagacctgaggaggtgggcggcaccaatcccacttcacaggaagagaaacagtccgagactcagcagtaagcaccgttccatccctgcgcagcagcaggctcccacgccctggctctccgggccataccaggccggttcccgcttcatgaatggaatgcagggttgaatccaggcagaggaaggtgtcaacagaatcaggaggtccatctaattcttcctctggcttgatctaaattgccagggagagagtgggaaggctcttcctagctggaggtaaaacacaaaaatgtttccctaagtggtacagacaaggacagccatgtctgttcagtcatcttcacacctttgactgaggacctctgggcactgtgcctggtgccaggactgtggaggtgagaaaggcacctccacagatgctgggaaggacagatgctccaggaatccagggatgcataggtggctacctgtcctttgagggctcaccagtggagtgaataccatgagggaaaggttcaaagaacccgccagtttcccccatggggagaagagttcagaggaagcggggttgctgggaaggggaaaggcttcagggagagtgggagacccttgagccctgcaggtgtgatggagcccatcaccatggattcctggtactgagttcttacttctcttccctgtgctggatgccgtgataggagctgggcatacaactgtgaaggagttcacagttactccacgttacagatgaggagactgaggcacatataaggaatatatacgtatctcattatcctatccatattctatattctctctctctctcctgttggttctgtttctttggagaaccttgactaatagtcacttactgagtgggcactggctttgctgctgaccatgtgttctagatctttccgccaggctggatttttggagtaggacttgttcttagggtcagtggtgcattgatgtgagagaagctcaggtgcgcctcttagggagtttgcagccagttggctctacagcatgcacacaggaaacaatgcgagaagctacaggaggaatttaatttccacgccacaatgtgtggagcctaggaaacaagccctttgcggtggcaccttgtatttttgttacacaacttaccctgcaggacagggaagcagaagccacccttgaaaacatggtgtctcagcctgggctgcacattggactcacctggagagactgaaagaatcctgctgcttggacctctgtccagggattcagagttcattgttctgaggtttggccagagttgagaagcactgtcttaggacaccttgatttctgagattatgtgctctcacctgaaaagagggaaccagagcagagttcaggaaatgagggcttgcgggccatgtcctgccagctgcctgtttttataaataaagttgtattggaacacagccacacccatttttaaaatgtattgcatttggctgtttttactaaaacagcaaaattgaatgttgccacagagactgtctggcctgcaaaacctaaaatatttactatctggatagttctttgcagaaaaagtttgccaacctctaaactggggagtaatgagttttgaaggacgtaggtggtggaggagaggctgggccaccagtgagaaggtagcaccctttcctctggttgagatatagacctggaaactttctcaacacgcacaggcagtcactgccagcccaccagggagggcacgcaaacatagcctttttgctgtctaggagttcttcctatagaatctgaagctttgctctacatggttacaggagcctagataaactggtgattaggccagagctgctggattctacaggggcagagggctgggctggagcaatggattcctttccctggtggcacctctatcagaattgaaaattgccactttctgtgacagtggcattaaaggagaggaactctgaaggcaagagggatgcccaggtggtccttagggaagctgcagaactgtcaaggtataacaaagccaggacccttgttcttttcttcttatggtgatggcacagaccagcaattctggacacttctggagtcatctttaccatactactctggaccagctcctctgtccaaatctgtgacagaagctgtgcaacgataggaccatggcctcctacagctttcccttatcccaggccataggagccattacttatagcgtgatcttcctcaccctctgagcagctttccctggcctcacccggcctgaagagttgattgtgaaggcaattttgtggagtgcaggtcttgtgagaggcctgtggatcaaatggattttgacactttcatttggtcaaccaacaactgattaccagttgtcaccgcacgaggacgtgctccatgtgaccccaaaccccagtattcaaacactttaacttagaaagggttaaaggctctgataagtccttcaatgaataaacctctttgcctttccttaaactcagctctccctgtatttcccaaactttgttcattgaaaaagaaaaaacctgtttccctgtgagtatgctgtagaatgactttctgttctacagctcgttctctggacatgctgcatctggggctgcacggagtgagcccagagagaatggaatgcccagagagaatatgctactttaatttccatttacatttaatgtcatttttgtagtttgttttataatgtacaaatgttaagacaatggcaggtagtacatatgagttataaataaataaatatgtatgtgggaggtattgctcaaaacttttttttttttttttttttttttttttttttttggagacggagtcaggctctgtcacccaggctggagtacagtggcacaatctcggctcgctgcaacctccgcctcctgggttcaagcaattctcctgcctcagcctcccgcatagctgggactacaggcgcacactaccacacccggctaatttttgtattttaatagagacagggtttcactgtgttgtccaggctggtctcgaactcttgagctcaggcagtccacccgtcttgacctcccaaaatgttaggatttcaggcgtgagcaaccgcgcatggcctcaagaactttttagtgaaaggaatgcttgatcaaaaatgtttggaatccttggtccagaaaataatgtccagtgcttattccagtattcaggaccttctctgccctggcccccacctgtttttgtctctgaactccccattactaccctctcattcagccaatctgagatatgtcctattcccttccctagttaccagctcctatgcctttacttctcctgtctccctccttatcttggcacgtcctaatcctccaattttcaaggcccagcctcgtgcatctttgctgaaaatctcttccagtcagagaagtttttaataatttctgtcccttgaatatccgacagcatcctgctgcctgggttgaccaactacagcctgaaggccaaatcttttttgcaactttgtaattttctggtaaatggctggagcacagccaggcccgtttgtattatctatggcagctgtcatgccacaacagtacaggtgaagagctgcaacaaagactctgaagcccaaaatatttactgtctgacccttgacagaaaaagtttgctggcccctgccctattgaataacttttaaatacttactcattgaaccacttcctgagcctgggcctgggccagtatctggtgaacaacacacccagtactttgtctctggtattttatatgccacattttgtcccctagattagttctgttgtgctcccatcacacttagtaggtcatcagacacacccacaaaagaattaaatttactcggatgacatggggaacaaggattcagaaatactgaggtgacttggactaaacatgtcttttcctgcattgatcatatggacaaaaccactgagcctcataattagagcaatgcattccaaagactgagaaatgattcttcttgtttgtactgaatcagccttttcaaaatcaatacagaagagacaaatgggtttggggaggagaagcagaacacacaatcgtccctggtaaatgatgagcgccattgagcaaaatcatgcttaggctttcatccctatttcatctgcattctgggcagcgcagattattcaattaaatggcagttttgaagctgctttcagagagcctgtgcatgaaccattattcattgtcctttgtcaagcaggctgaggcttcattttgctattttaacttccagttctatgaaacgatggagtgaaggcttgagtttggaaaaggtagataatatgtgaagcgctttggtctatggaagattaagacttccttcaacagggtgctgtattagtctgttttcacactgctataaagaatacctgaggctgggtaatttataaaggaaagaggtttaattgactcacagttccacatggctggggaggcctcaggaaacttacaatcatggcagaaggggaagcaggcctgtcttacatggcggcaggtgagagagagggagagagagagagcaagcatgaaggggcatacttatcaaacatccacatctcatgagaattcactgactgtcatgaggacagcaggggaaactgctcccatgatcccagtcacctcccatcaggtccctccctcgacacctgggaattataatttggattacaattcaagatgagattgggtggggacatagagccaaaccatatcaggtgctgtgggaagaagtgctgctgacatgtgtcctagaaagcagactgcttaagagaaggggtccttccaattggcattgagcggttcatgggctggtcaaggtatttccgcacagtgaggagtgccattgattggtctttcagcagaaaagtatgatgtttttatttctgggtgacatcttacagtgaattttgctttaaaaaatggttagggatggaattttttaacttgagttctgtttctataaacttcttgaattaataattcaaaaagaattgaaaggtctttagtgactttaattttttttattgaggcatgaatttctatatggaaaaatgcgcagttctttagcatacaattcaatgagtactgacaaatgaatccacctgagtaacccatgtatcatcaagatagggcaatttggccaggtgcagtggctcatacctgtaatcccagcactttgggaggctgaagagggcagatcacttgaggccaagagttcaaaaccagcctagccaatatggtgaaaccccatctctactaaaaatacaaaaattagcagggtgtggtggtgcacacttgttatcccagccacttgggaggctgaagcaggaggatcacttgaacccaggaggcagaggctgcagtgagccaagatcaggccactgcattccagcctgggtggacagagtgagactctgtctcaaaacaaacaaccaaccagagagggaaatttccaggactccaggaagctctgttgtgtacctctctagttgactctcactctccctctgagaagcaactcctgagtgccatcactattgaataataattttgcctgtattagaacttcgtatgtatgaaatcatgcatatgtactcttttgtctctggtttcttttactcagaatgtttgtgagattcattgatactttgaatgtatcagtaagttgttgttaagtagtaatccattacatgaatatatcacagatttgttaatcctttaactgttaatggatatttaggttatttctagtttggggctattatgaatggggtttccgtgaatattcacacaaatatttttgtgggcatatattctcatttcccttaggtaaatagctagaagtggaattgctgggtcatatggtagatatatgtttaacattataagaagctgcaaaatgtttttccaaagtgtttgtaccattttatatttccacaagcaatatatgagatatttgattgctccatatccttggcaatgtttaatattaccggaatttttaatgtcagcacttctagtgggtataaaatggcatctgattggagttttatttttgtactttcctgatgactaatgacattgaacacatgttggtctgcggattgaccattcacataccttcttttgtaaagtgtctgttcaaatcttttgcccatattttgattaatattttcagttgagctacaggagttgtttacatatttagggcacaggtcatttttcagatgtgtgtattacgaatactttttcctgaaccgtggctttcatttttgttttattactggtgaatttgatgaccagaagttttgaattttcataaattccaaattatccatttttaaaatgtaagtgccttctgtagcctaagaaatcaacgcctacctggaggccataaagtatcctttacttttttcctagaaatattacagatttagtttttacatttaagtctgtcatccatctcaaattcatatgtgtatgatgtgagttaggggttgagaatgtagtttttagtcatttgcttcagcacagtttgttgaaaatactgtcctcactgaattacctaagcacctttatttgatgtcaattgaccatatatgtgcagctttatttctgcactctccgtttcatgatctgtttgtctattctaatgcttataccatactgctttgattaatttgatttagaggaaggcccaaaatcagaaaatgtgagtccttgggcttttttcttctttttaaaaattgttttgaaaattgaggtctcttttacttatatgtaaaattttaaatcagcttttcaatttatattaaaaatgcttatatattttgattgggagttcattgaatttgtagatcactttgggaagaacttgcgtcataaaatagaattctccaatttttgagcaagctatctctctccatttatataagtcttctttaagttcaaacaaatatttgtggtttttagtactttgtagtatacaggcattgcacatagtttaatatacacctattatagtttaattgatacctgttttattctatgctatcataaatgctattattttccagttcaatttccaactgttttgtgttagtatattgaaataaaatggattttgtgtatttattttgtattctgtgatcttgttaactctctttaagttatattatgtgaattccttaggattttctatatagacaaaatctatgtagaaaagtaaaggtagattttttcccttttcaatacctatggcttttgtttatttatttgtcttacagtatttgccaggaccacctttacagtattgaacagaagtggtaagacaaccttgccttattcctgatcttagggggaaaacattcagtgcttcttcatcaatataatgtcagatacatgtttttttgtaaatccttttcattaggttgaagatatttttccttatttcaaatttcctgagggtttttatgatgaacaaaaattgaattctatcacatgctttttctttatctatttgatgttatgattttccttctttgttctgttgatgtggtgaattatgttgattaatcaaatattaaaccaaccttgaattcctgggattaatacagtttggtcgtgatgtattatccctttatttataggtggatttgatttaaaattttgttaagatttttgtatctaggcttatgagggatattggcatatagttttttttttttttaaagttcttgtttggtgtcaaggttaggctaccctcattaaattagataggaagtattttctcctctaattttcctaaagagtctatataagattgtttgtatttttttctcatatatttgatagaatccatcagttaaggcatatgaacctagagttgtttgtttgttttatcatggctattaacagtgaaatcaatatcttttgtatttctagggccagttatattttgtatttcttcttgtgtccattttgataatttctgtttcccaaggagtttgacatttaacctaagttattgaacttattggcataaagttgtttgtaatattcccttatcctttcattatctgtaggatctggagtaatgtttcctctttcatcccagatactggtattttctgctttcttactttttttcttaatcagtctaactagaatttcataattttgttaattatattaaccaaattttggtattattgattttttcctgttacttgttttgttttaaatttctgtacttatctctattactttattccttcttttaacattgagtttcatttattcatctttttaataccttgttaaggtagaatcttaaggtagactatttatcttgaaatttttttcttctatattataagcttttaaatgtgtaacttcttctctaagctctgctttcgttgcatctcacaaatattgatatgttgttttcattatgattaatttcaaaatattttccaatttcccatgtcatttttttccttgacatatgtattattaataagtattttgtttaatatccaaatctttagtctatttgcaggtatcatcttttattaaaatctagatatcaatgatatttttcatatcaatatcatacattgatttctaaatttagctcattattatcagagaacatagtatgtggatttcagtcattttaaatgtattgagacttgtttgatggcccagtatatgatctagaaaagaatgtgtgctcttcagttgttaggtatggagttctataaatgttaactaggttaagtttgaaagtagtattgctacaggaccaacccccaataaaaatcctgaatgctgagtctctgttagacaccacttccaatgtattattacaactcattaatagaagaattaagtataatctctgtgattgcactggggcagaactcttggaaggttgcacctggattccttgggactttgcctcatgtaccccttccctttgttaatttttatttggatctttgtactataattttaaaaagaacaaatttttggtttcattgatactactgattttctgtttttaatttcattgatttctgctttgcagaataaaaaatatacattttttctgcttactttagatttaatatgctcttctttttctagttttctaaagtagaagcttagatgattgcttctagatcttcttttctcttctgatacatgtgttcagtgctataaatttccttgtaagctttgcttttgctacatcccacaccttttgataggctgtgttttcattttaatttttaaaaaaattatcttgagaattcttttaaaagtatgttgtctaatctccaaatattttgggatttttttcagctatcttttttgttattgatttccagtttaatttcattgtggtctgagagcagacaccgtatgatttccattcttttaagtttgtgaagatgtgttttagggcccctgatgtggtctatcttgaatgttccaagcaagcatctttacatgcttaagaagaatgtgtattcttctctttatggatgaagtattctataaatgtaaattagatccaattgatggtattgttcatttcaactgtattcttaccagtactttgcctcctgagtctgtcagttactgatacaggggcatttaagtctttaactataatagctagttcatctgtttctccttgcagttctatcagtctttgtttcatgtattttaacgctgtgctgttagatgcatactacattaaggattgctttgtcttcttagagaattaacctctttatcattaagtaatgcctgcctatcttattccttgataattttccctgctctgaagtctgttttgcctgaaattaaaccaactaccctcactttcttttgattaatgttagcatggtatatcttcttcatccctttacttttaatatatctgtgtctttatgtttaaagtgggcttcttatggacaaaatatagttaggtcttgtattttaatctactctgccagcctctgtcttttgattgatgtatttattccatgctcattcaaggtgattattgatatagttggatttatatgtaccatatttgtaacagttttctattcactaccccaggtccgtccatcttccttccttcctatcttccttccttcctatcttccttccttccttccttccttccttccttccttccttccttccttcctttctctctctttcttttcttttcattcctttctttctttctctttttctttccttatttctttctttttttcttctactctttttctgccttctctagttttaattgaacatgttatgtgacttaattttctctcctctcttagcatataaattatgcttccttttacagttattttagtagttgccttaaagtttgctgtatgcatttacaactaatttaagtccacttcaaataaccttacactacttcatctgtagtgcaggtatcttataactgagtgtcttggccatttgtgctgctacaacagaatacctgagactttataaattcttcttaatttataaagaaaagaaatttattttctcacagttctggaggctggaaagcccaagatcaaggtgctggcatgtttagtgtgtggtgtaggctgctctgcttccaatatgatgcactgatactgtatcctcttgaagggaagagtgttgtttcctcacctggtagaagatagaatggaaaaagggacagactttctctgtcaatccctgttataaggacatctaatcccattcatgagggaggagccctcatggcctattcatctcttaatgaccacaccacttattactgtcacattggaacacctaaaatttggagggaacacattcaaatcatagcacagagtattccacattcctccctccggtttcttataacactgctattattcatttcacttatccatagacagtaatttattactattattattttgaacaagctgttatatgttagattagttaagaataacaaaatattttatgtaccttcatttattcttgctctaacactatttttttttttttttggtaagacagggtctcactctgtcacccaggctagagtacattggcacaatcatgactcactgcagcctcaacctcccaggctctggtgatcctcctcgttcagcctcctaagtagctgggactacaggcgggtgctgctgcaaccgactaatttgcctgactaattttttttttttttgtagagacagagtttcaccatgttgcctagggtggtcttgaactcctgggctcaagcaatcctcctgccttggtttcccaaagttctgggattacaagtgtgagccactgtgcctggccaaacattcttcctgtcttaatgcagatgagaatttctaaactatatcattttgcttctctcttaagaacttttaacaattcttgcaaggcaagtctactggcaacagattccttcatttttgtttgcctgagaaggtctttatttctcctttacttgtgaagggtaatttcatgggatacagaattctaggttgatggttctttctttgaacactttttaagtggttcactccattctcttcttgcctggatggcttctgaagagaagtctgatgtaatccttatccctgttcccctacaggtaagattctcccaccctctttctggtttctttcaagattttctctttttctttgattttatacagtttgaatatgatatgtgtagatgtaaatcttcgtaatattcattgtgttcagtgttctctcaacttccttgatctgtagcttgatttttgtcattaattttggaaaatactcagccattattatttcaaatatttcagtttccattcttctcagtctggtgtcccattacacatatgttacacgttttgtgattatctcacaattcttggatattctgttccctttctattttctcttctttttgcatttctttttggggagtttcttttgacacatcttcatcctctgcaattatttccttggctgtgttcagtctactaatgaaccagcaaaggtattcttcatttctgttacaatgtttttgatttctagcatttcacattgattctttcatagaatatccacctctctgcttatattacccatctgttcttacatgtccgctttttccattagcctctagagcatattaattgtagttattttaaggttctgctctgttaattccacccacacctgccattggccatctgatacagtagatttaaggacagactcaagatagatggcctgtatttgaattctggctttccttatcagctgtgtaattttttgcaggatgcatacattctctattcctaagtgtcctcatttgtgaagtaggaatactcataaaatccacctcataacattgttaggagaatcagatgagttaacacatgaaaagcacttagagtgatttctgacacaaagtaagccttctgtatatgtgagatgatgatatagccatttgtaaatcatgccagcacactcccatctgagggcttttcccttgctgttctttctcggatgtttccctgatgcccacaccactggatttctcccctcatttaatctctatttgagtgttgccatcgcagtgagaccttctcaaacaccatgtataaacacacagtccttctgaagctgctaatccctttaccctgctgtattatttttccatagcaagcatgatgatctgacgtatatttgcctgttattttttgctgattttcagcctccttcaacttaatataggctacataaagtcagggtctctcttcaaaatttaaagaattaaaatgtttctagggcagttttctctatatgcacataagaaagtactgcgttgccccttaacatttatgttttctgggagtatttagtgacattggaaactatttatataatgctatctcacccatgcaaaagcagccatggacagtacataagacataaaaagattatgtgagcagatcagggtccacagtgtaagggatggcacatggcctgtgcccaggtctaagtgagttcacagccctcttccctaagccacatgtaatgttttttgactttgtctttcagtatgaatacttcaatgctgtgctgataaatgaaagggacaaagacgggaattttttggagctgggaaaggaattcatcttagccccaaatgaccattttaataatttgcctgtgaacatcagtctaagtgacgtccaagtaccaacgaacatgtacaacaaaggtaagactcccagccactgctccttttagaaggtgaagaatcagggggttgagaagcaggggctggctggtttgggatatagttttggtttgtttcattttttttgaaaagcacagttataagctgagtgtgtcaggtatcaactggataggtgaagcatgtacctgttctgcctggagcttctgggcttgctgtttctctggctggttgtttacatcaggctctctaacatgtagaataggggttggcagtttctataaaggaccagatagtaaatatcttaggctttgccagccatagagtctctgttgcaactactcacttctgctgttcaggcacaaaagcagccaaatggctgtgttccagtgaaatttatctacaaaaagagatggctggatgtaacctgcaggctgtagtcttctgacccctgatgtggtacctttgttttcttcttccagtttgtggaatggcatttaagggctggagagctcctaggggtgcaatggaaacagctggggtcttttcttagagtataaagcagcatggaccttaacagaattccttatttccaggcttgtgtgcctcaaatccagtcttcacataaactctagagtttatttttccctaagttcccatctgccaattccagttggaattatagtggccaaggactgggctctgacatcggatggattctggtcagaccgtgttctacttctttctggctgtgaccttgggcacgtcacctcatctttttaggtctgaattttctcatcttatgatgtgaataataatcatatctacctcctgggggtggttttgagggctaaatggaatgatgtttataaagggtttaagttgttttcagcatctttatcctattgctatcgagtagtagtttgctctgcttggtcatacctaaaaaacttctaaacaaagaactatcctcctagaaaaataagccagaaagtcatggaatcttcaaagtaaaaaatgtgccacattgtctcccatcaaggtttcaaagatatcaggggccagtttccaaatcatatacaagagctcagtagtcaagagcaagggctatgggtttaagtcctgatcttcctcttgtaggctgtgtgatcttaagcaagcaactttgcctttctgaggctcagtttccctatttgtgaaatagggataatgatgctgcctccgtcagagggttagtgagaggatatgaaatgatgtgtgtgtagcccttaatacaacagtaccatacagaaagtgcgcagtgcattttagctgccgttgtttttattggaaaataacgtgaatacaaattgcacttctgaaatgttctaagtcactatttaaggggcttggtcagtgattaaagatattccaactaactgtctctgaaacatttttcttacgcgtgttggatattaggtatagttggatacctaatgtctctttttcctggtttacctgttatccatccttaagagtcagtggaggcagtaccccattcattaactgttctgatagttactggggattccgaggtgaatcagatgcagcccctccctcaagaggttcacagttcatatagggaacagataatgagataattagaacaccatgtatcacatattggccacagtgtggacagccaggggacagtgggagtgccaaggatgggacctgtctacttcttcacatgggcagggccacagttcatctttttttcttttttcctcttagagaaagtgatgtgaatctaaacaaatcctagagggctctggactgggccatatcctctaccctactctttactttgggctcttccttagaaacaaatggaaccaagacatagagggctgagctcagcttcatttagtggagtttagttctctagaatgatcctgtcagcagatgaaatcctaaatgaaactgcccctttttgtgcgatgtggccaaaagaaagccatcttcttggcattcaatatattcccaactgaagatgaaaaattaacatgattttacagagcaatttcagacataaaacaattcagaatgatcttttaaaatatgacagctgcttcaaggtttcttgagccattaacaccattatagagatttaattgcacctctagctttaaaggcataattgtgccttttaatggtagtaacacgtaagggacccacaccaccactgatcacccaggctatagaatcatgcttgtaatgattcctagacagaatcttcagagatagtcagattttttgagccgttggatgtagctaatgatattcaaagtcatcctcagcagccctcctgggatctgcccatcacctctgcccagtccattgtcacccagccaggctgtggggcatggaccagggtcagccaggtgttctgtcttgtctcagccaggcagtgaatcactgcccaagggcagaggagaggcagggacttcaggcaaattcctgtctccactctacctaattcaaaacagcccctaacagccttttttttttgttttccttttcaagctgcaggaatatattttatgtttagaaggccctccagctcagatctagttattgatgacgtactcaaaacaaatgctcagagattggtcactggctgtgctgtttttgggttggaaatcttacccccagcgaagaaaaccaatacaaggtcattctctcctagctgcttggacttctgtgggcatataccaaagtggtttgatacttgcctaggagcttctgtgatctatgttctggggtataatttttagttctagatgaaactagctggtaaactctacctgctttctacaatctgctttctgcctccgtgggcgggcctggcaactgggctgctcagccgggtttgtgctttcctctctggctgaggtgcctttctcttgagcactgaaagagactgcagcttcaaagttggtgatgtgggcaagctgtgcccatgggaactcaaagaggcatattcattgagtgtttagaaatgcatctcagggccctcaggttgcctgatgcagcagcttttttcatgaaactccttcagcagatgtttgctgagtggctgctctggcatccccagcttgtgagtcttactatttcggagactttgaagatgaatggctgatacctttagagccgtaaatgactccatatcctctatgagtaaagcaagaggcaggatgcttttgcaagaactgctgatgatctggcagagaattcagataaagctgaactcttttaaggactttctcaactgaagtgctgtaaagtttatacgtatatatacacattatatatacacacatatatatatacatacacacacatatacagtacatatacacatacaccttatatgtatgtgcatgtttctgtctatgggcaggtctgttcatgtgtgtttgtaaatatgtgaatgtgtgtgaaagaaaatgctgtgctctcaacctattccttcatttccattttccacctctgtccacccgggtgagaccctgcttttgttcactgaacacaccttcctttttcttccattgtagtgtatttcactgtttttattcctattatccctgtccctcctttcctgcttgtcctaatgcctattcttagaaaccagctcaaatataacctccttgattctttttgtcttgtgtgatggaagtgacttttgtttattcctctgctctagcattgctctgttctgtgaatgcagagcatgcagtctttccttctctactttaggttctctgagggcagaggaccctgcagatgcagccttgtgccccctttacccctgcccatgctctttacagatgagtttttcccagatgttggttggtgtggaagacactgacacctgtgcctcctgggctatgagatgtcatccagggctgtggtgttttcatggttcttataagcaacagaaacagaacctggctgatagcaaagaaactttttgagaggagactgggtggcccacagactcttcaggaaagctaaagaataaggcctggaaatgtctgggaatggagggaggctggggccagagtcacacccagagtcacacccagatccaacctgacaaggacccactgaccccagggttgccctactctcacatctgtaactgcatacaatacctgtgcctcgttttcctcatccctaagctggagatgacaatcatagtgagttgcctcgggggatgtgctgaggattgaacacttagaggggtggatggcacatggtgtccatccaggactcaagtgctgtggtctgaatgtttgtgtccttccaaaatttgtatgttgaaacctaatcacccaggtgatggcattaaaaggggagcctttagcaggtgagtaggtactgtaactccaagactgagggagcttgttgtccaagggggctgtggagtggggcaagttgggcagatcccagccaaagtggcagcagcagtgggaacaactgctcctttgtggaagtcagaaaggcagttatggagcctggaagggctggccaggtggtgagaggctgtgggagccatcaggaggtcatgaacatgatggtgacaggtgaaatatggctgacagctttgccaggaagagagccactgaagaatactagttcccactcacactgaagaagagggagagggaggaggtgttcagggcctggtttggagaaaatccagagaagaacagcacatgggccaagactggatggataaggtgagagcccttgggcctggggccctagagagcaagctccagtgagcatatcagccccatgaaggcgggaaccccagcaggatacccagcacatggtagatgctcaataaatacttattgcaaggtaagggaatgaatatagattacaatcaaaacactgttttcactttgttcttgcacagaggaagaaaaaacataggaagtaacccaatctcaattcctcttcttcccccagtaacggaggacatccgggagaggtaggctgaagtggcagaggtgaaggggaggtgtgaattgcaggacacaggctagaccacgctttcatcctctagacttccccagcagggcacccagtcgggctgggaaaactgggctgcaaagctacattgtgctcagggtccagcccctgaaaatgaaaagagctccaggaaagggaagacctgtaaccaccactgcagagcatgagaaatcagtctgtctgttacagtccaataggttcttctaaaaagcccaagaaaagggcagaagtctgatgagatggcattgggtcccctgcttaggagcagagtatgcaggctgctggagggatgggcagggttgctgaatttggatttgtcagatgtctcaacctatttttcaaatgttgagcttgataaaacacaaaatgcattttgccaggcacttttccccttaattacatgtgtatattttaaggaaaatttaatccatatgtttctgattcgtttacacggaaatcattaaaatattgttttccaagagctatttgatgtgcaagaaggctcacaaaccttataaaaagctgtttaaaattttttcctttccctttgtttcttttcccttcacgtgtgtgtgtgtttgtgtgtgtgtgtgtgtgtgtttgagagagagggagagagagcacacgcacataagtgaacaagagtgactgaccccaggatgtcagaaacaaattccaacttgaaatggattttcttctcaggattctgaactaaagcatttggattaggctccaatcttgcttccttgttgtctcccagccctaatggaatgtgatgatgatatggccataacttggtattgggagtcaagatcagaggaattacaccagagcacattgctctggacctagagaaataacactcgagaacctcctcgcacatggtctgttggtacctacagtcctcagcaaggcccaggaaactttcccaagatgtagtttggattccaggaacccctattccagcaatatgagcataataggactaaggcatttggtaagaaacatacaagatagtgccactgaagtaactccacagctgtcatcccaaatttactcatagtttttctcttctagtttggaaattatattttatatggcaaaataactatccctgacttaaaattcacaagttgagtggctgagttcaagtctattggcaatgcctccatacttctgcatgtgtatgtggcacaataggtctgcagagatgtatatgtgtgtatgcataggtttgtgtctgtattttctcagaagttgtattagtagaaggaaggtgtgatttggccctttgtggctcctcagtcctatgcttaggcttatgtttagcctggaagttgcatttcatgaatgagtaggtggatggatggataaatggatggatggatgaatagatggatggacacatgcataggtagatggatggatgaatggatggatgaatggatgaagggtgggtgagtgagtggagggatggatggatggatgggtaggtgggggaatggatggatggatggatggatgaatggatgaatggatgaagggtgggtcggtgagtggatggatggatggatgagtggattacttaccaacagccatgctctgtagtgaggactttcagtgcattatctcattgacaatgaccccatgtgttatagaagcagtggggaccaccattctccaaggcaattcttccacagcctctgttctagagtcaggtccagggaagttacctggggcaaaactcaaaggcatcactttaggtacaggtgattctttcccaaaatccaagtgagaaaagagtttatgcttcctgcctaaggctctctgaagcactgttcctgtcccctggttcccttttcacctgggtcactgtcccttgccatccccatcatctctgttcttgtctaccatggagctcttcccagagctatcaaggagtctttggagattggcaggcctgggcttgtatccagtgctatgagtatcagcatggtggactagaaagggcatttcactcttgggccctctgtttcttcatctgtaagatgtaaattgtcattttgagcattaaagaaagtgaaggtgcagcatccagcagaacacctggcacacggaggaatttgatacacattgattcctcacactgactcagctcccagcaaaccagatgggttaccgtcactgtcctgccaaaaatatgtaggggatgctcttccccaagcccagaccccttccattcagccctgtttgtagaatgaagtgcaaacacgctcacaaaccagctctggtttactgtcctcttttcctggctaccccattccccctcttcctggtcatgctagatcccaggattccagactctctgaagacctttgcttaggctctgacctcctgctgagggtactgtcctttctccattctggaaagacctgtcctttcctgagagcctggctccatggctgccatgtctttccctctggccctagccctcctctccagaaacatcctctgccccctcatttatgcccccgtgtgggggttttgtctctccttctgttagattattcatcacatttttcagcagtttctttttcactgcactctcctcccttgaacttggaggcaggggctgtgttttttttttcattcccttgggaccatagcagaggacctggaatagaaatgcgcttctaaggatgttgttgaattgaactgaatcctcttattacaggccatcacaaatggttgttgttttatctgcttgttggttctgtcaactcttcttctatttaaattttgattcttgtttgtttctgaagacagtaattttagatgtatacctaatgaagtaattactttcaggatctaatttgtttgtatttttaatctcttttttcaaaggaatgggagtccagatggagtctcgcagttggataggagctgcacctaggctagagaaattctgaaaggtggtaccaggagcagtaaaggacaatgggagagcaggaatggttactaatagtgttttatttcaccctggtgccccgacatttgtgaaaggttacagtaatagtagggagctggagtttgtagatgatttatttttaaaaaatggcttagagaagtttcaaggttacttctatgataacttcaggatcaagcacttgctttctgtgttttgcctgggaaggagaagggtggagccaccttcagcaccgtgaaaattgcagcagcaactgttgcagcctgtggtggcagtcaagtatgttccagtgggggaaagagattaagagctactgtccctgggctgactcagttagttatatatgccacaggtccccctgtttgagaaagggattgccttgctgagggaaatgcagactagacttccaggatttaagaagcacggtagagaccagtagatggtctgcaggtggctcccaggcctcctcaggaatgctagccaggtgccctggccagccatcgggctcgcacagggtgtgtggtatgaatgtgaatataatatatccttgctgcctccatgttgaccctactcccacaaaaggctcagaccatgcttcttgcttatctgtgcaaagacaatgatagcacctatctcatgggggctttgtgaagataaaatgaaacaacggatattaagcatttcagactactgtgtaacaaaagtttactgagagctcaattgttagtattgttataagaatgatgatagtgacaccgggtcccccacagtggcatggcttatgcctgggaatatctctgatcctgagccaggtagccttcctttttctcctgcaccttggaaacccttttttcactgcagttgtacatcaagaaattcagtgaagggaggacaatgtggaggtagagttgctgggtcagaggctgacaagcaccctggcaggtggctcagtctttgatacctgcacctgctctccacccacctgctcatgatgcatggatgtggtgaacctctgtgtgtccatgtcctacttcttaggccactttgctcccaggaagcttggtgtctatgtcagtgaaaggctgtagggcttcgtattagtctgttttcatactgctgataaagacatacctgagactgggaagaaaaagaggtttaatggacttacagttccacatggctggggaggcctcacagtcatggcggaaggcaaggaggagcaagtcacatcttacatggacggcagcaggcaaagagagagcttgtgccgggaaactcctccttataaaaccatcagatctcgtgagagttattcactatcatgagaacagcatgggaaaaacctgccccatgattcaatttcctccccccaggtccctcccacaacacatgggaattcaagatgagatttgggcggggacacagccaaaccatatcaggctttaagtaatgctctgctttccttttgctggtaactcttagaaggacctgggggccctcagatgtttggaagcaatagcttccagggacataaagaaaatcttttcattttttacactcttttactcttcccaaatccaagctgatggaaacttctgtccagaacacactatctactcattgaccttagagacactcacctgtgccttagtcaactgatgcctccatcagtttcttttccttcaggtaacatttttgtggtgcttactatgtttcaggcataatatgatctcatacaatgcaatcctaccccaactcactgaagcaggaaccattactaattcccactttagaggtgagaaaactgaggcttagagacttgctcagaattactcagctagcaaagtgggcaatcagcatgcaagcctaatactttggctttagaaccacccgggctccacactgcctccctatactgtgcatctccaccaccctgatggctgagttttcagctagctatgtcatgcctgtttttgtttgtttgtttgtttgtttgttttgagatggagtatcactctgtcacccaggctggagtgcagtggtgcgatctcagctcattgcaacctctgcctcctgggttcaagtgattctactgcctcagccccccaagtagctgggtttacaggtgcacatcaccatgcccagataatttttgtatttttatcagagacaccatgttggccaggctggcctcgaactcctgacctcaagtgatccacctgccttggcctcccaaagtgctgggattacaggcatgagccaccgcacccagccgtcatgcctgtttatatgcacactttatatgtgcggcaaatggaaggccctgtttttgtcaaattgtgctattttcatctcagcatatgaaaatccatcataaatgaaaactagtcttattttacataaacacttccaatttcttccctttatgaaaataatgttgcagcaaagagtcgttttaaaaatgggaggcaaattctgcatcagaatgccaatgggtaccaactgctcacacataggggatatttctgttgggaatgagacagttccacatttaatcctgcaaacttgccataccaaaatatgtctaagagaagtgagtaaggaggtgatgatgatcagaatgcaaaaaggctcttctccttgccagaaagttcactgcagtgtgtttaggagaagtgaattcctccactatagcaactggaatggcatttgcagaactgggttctgtgggacactgccaccatctattgatttaataaatattcgtggagcacctctagcatgccagacgctgcatgggtgtgaggaggtgtggtgagagatgagcagactctgcccatgctctcttggagcttacaggtcagtgggaaggcaggcgggaagtcagcacacagctgggcatatgatgcacccggaggaaatgctgtggaggaaagggttgtggtacagtaagagtgtatcccacagcagctcagcctgggtgaactgggaaggtgggggtggccacgggcagaggacacttaggcccgctgccatctgaaggatgggtaggaaataatttagccaggggctggggtggggtgggaggtggagaatattgcagtgggagagaacacaccacacaagctattggtaagtagtccttcacagaatgttttgggttgaaataagggagggtgatgccttggagaatctaccgcttgtgccattgcactatctacctgagatgttcaaggaatacgaatttctactgtagaaaaagaaagccgttcaatctgatgcatcagcttttccctaagttacttgattatggcatccttttatcatggaacgtctcagaaggtatggacgtttcctgggaccaagagattctgctgagctggaactccctgtgctcaagagaaaggtcccaaaggtgcccagcaagtgacaaagatgcagaagaaaatgcatagtaaaatccgtgtgtgtgtgtctgtgtgtgtgtgtgtgtgtgtgtgtgagagagagagagagagagagaaagagagagaggatataagtggttgtatatgcagaagatttctggagagatgttcaggaaattaatagcgctgactttccactttctacccttctgttcagtttgaatattttatgaggaacatgtgctgcttttttagtaattaaaaatgaaagaactaaagaagttgagttacaaagctgcgcccatctacaagttagttgttcagagaacacagctatctgataaaaggaaatacgcctgcatgtaaattgttaatggcttcccaggtgctagctttctctgctttgtggtgaaaatggccaacagtagttttgttagaggtagcagaacgcccaagtaagttgtttctggcagtcagtgcagatgctacctttgcaggagattgtgttaagtttcatactgtgtccttatggtggcagtagttattttaagatgaatgatgttggcctgggaaaagagaaatggtttccctctaaaatgattctgtgatactctagtcatctgccgatgggtgtcacagacatggaaatgccctgcctcaaatatgaagaacattctgcacttgggaaaaaaatatgtcagtgcttccaagggtcacactggaaactgggattagaagtgaggttttcttgtctcaagaagtgactgtgcagtcccatttgttctctcactgacagagaactttcaagaggactttgtgaagcacctgttcctgggcctcagtggaccctcgagatgggaggcccagggctaagtggccaagagtgcagcagccagtctcctctgcttagatccattgtcaaaggccacatcctggagcctgacatgcatcagggacatgtgtcattgggggtttgggccaggggttccttgtaggccatcttcactacctgatgaatgcctgacaacagcacaggtgggctttggggataaggtgccctctctcagggatgttctctgctcagggccaccagttccttaagatgacatttgaaagttcacacctcagataggtgagtttctagtacaaatgacttgatgacctttcttatttctgaagacatcacaggctgccccgtgtggcagtgccatttcatcatctccaaagtgccaccgtctgaactcttccttcattcttaagtgacagaggtatttctgtacatttctgatgtttttcttttttccaccctcacttcacggtggtagaacaattctggagtggtttctacttcaacaactgctgctgtgctgtttcatgcccacacatgtagatatttgcatgtctccataggcatagagatgcaacacactggtactttatcatctggcaggtggactgatccacatcttagagatcaataaaatggcctacagagattgagggtgcataactttcagactggagtgaaaagtctctgggttccaagtctggttgcccactagtgctttgaagcagagccccagcggttgagtccacgcgaccacatcttcacccgtgtctactttattcaagtcccaggctggatgtggggaaattggatcagaactgactttcagagacttttctggggtagattttcatgttctctactcactgctatcaaaggcagggtgggaggaggggaattagcaagacaaagtgcccccaaaatccagatgaagaggtgatgaagggctgtctgttgggtctgcaggctcaggaccagtcggggtacctgtgatagaccagcactagtgagatagtggaagtttccccctgcaggagtgggagccccagaaaaggctgagttgggtggtggtgatttgctttttcacaaaccactttatagtagtcccttctaaggatcacacggatttgggtggtggtgatttgcttttccacaaaccaccttacagatgagaagacgcaggctcaagaaggttagttatttcttcaagtgtgaatttggatccaggtctgcctgttgtcctagctgcgttgcttaagtgggcaaaaagagactcccctcgagcagtggcttgggagaagcccaacccccaggctgctcctcattgatgaagaggaaaggttttcttggatccgcctggtcaaagccagattagagtgtagccatggctagttcttaatgacagtttctgcagcacaggctgacctcagctaggaagcattggtgtgggtatgctagtggttcagatagtgaaacgatgtgtgtgattggtaaatgacatagctccaagaccctcgccccagggcctcttgtccaccccagcccctccccacaactgaggagtcagcatcgcagaccacaggctgtgcccacctgctgcacaggctgtaaacactgagtatcacccaggtgtagagctgttgcgttccttcaactacaatataacgtggtttactgacagtgacgtcagcagtaggtaaatgtgcgtcttctcttcatgcccaacagaggttctgcctcttctctgaggggactcctgagcctcacagggcatccaggtgtcagctcacgtctcctgatgcccccaaggctgccttgccttgggctcaccttcctgttgctccaaccctgcctccctccttgctctgcatgcccttggaagctggctgacaaggcttccagggctgtctcatagccagtggaccaggaccccactgggctgaggtacgagcctaaagttgccccgggcatcctaccataagaggtcagccatctacctcagctttgcagccctcaggacccctggtgcttggggaagtcgttctggggctgggctttcctggtgtctttccaacaaagcacagtgggctcccataagtatcgtgaatggaatattttcagggactgaccacatctgcagaggcttctttacattaaaacagggctggggatgggggtggaattttcccctgctaaatgcagagctgagactaacactgtgtgtcagcgtggttacgagtggtggttggggtcccatccccgctcctccctttgctagctgtcagactggacaagttagccaactcctgtgagagttccgtaaggcctgatacccctacagcatgatggggagaagctacctgtgagaaagaatggcaaggaatggtagagagagggtaggggaagtgaggggtgaggaagtgggagagagagagagggaaagcaagagcaagcacctggggttccccccagtgtctgagaagtgcccctctgagaagcaccgagatggggtcacacagagtcctggcgtcttcttcatgcacccagcacctgtgtgacctgggccagtcatctgggaccagctgtaggctcctcttggcctcagccacccgactcattgtttttgtgcctggtattcttgataacctgattccagaaatgctctctgcttatcctgacacattttattctagagttttgggtttcttttcctctgtagctcattctaaggagttcgatgaaggagatactatgagaagttgtttcaactgtcaagatatgaaatatcttttgacatttttcaaccatttttcccctcccagatgtcacttgagttaataaaacaggaaagaagacttggggtttggtggttattttttttacttatacaggaaaagccatcttcagcctataaatatggattctgtatagaatatttgaaaatgacatttagtagctaatgtgaggaattaacaagtatatgtcccttgagaaattgaggggggagaaaagggactcaggggatgagggtggaaacctaagaacctcacagggtgtgggggtccgagtgccacctgcacacggaagtcatggtgacgaacatgctctgtgcatgtctgcctgcagggaggggcctctaggtgccaactgtcctcagttgacagatgggtgccctttggggagacatgaaatgcctacacctgtgaaatctgccatgtgttgtgaaggccagccatttcacactcgtggagtcatcactgagaaagaggctccccagggactggtttctaagatgagaggtcagtgtcctggtgttaacagtaatgacttcttagcaaggcaggggctgtaagaaagcggggttcacagagatgtgagtaggcccgaactgccttccagcccaaatgcaatctgggggacgctctgatcccattcaccctccaccatctcacagtgctctgggtgacaccagcgtttgagaggcagggatgcctcttttcctataatcaaaacctatagactaacagccccaccccagagtgaattggagatgaagaagtcagactgttcaacagtgcagtagggagtattttctgagccttgcctccttttcaggcaacacagcggcaatgataatatcttttcctattctaagcagtgcctttccctaataaatagcttagtcgtaggagatatgtaatatactttcagcttgtgccagaaagagtcttatctcccattccaggcctgtggcatatatttctgtataatggatggccaacttagcaggaattgtttcatactctgtgtctgaagggatttggtttatattagctcagctgacagaaatctaagtcagatgtcctgttgacaaaggatggagaccaagatctgattttaaatgggcagtgagtattaacttggttggttgaaaagcacaacattacgctggccctgaatggctacgttaaggccactggggccagaacagtgccagccaagaagtgaagcaaagagtttgaacacacctattatataaagctgtgtctgcattaagaataaaacctcttaagatggcagattgcaatattgtggaaactaaagtggccagtggagacaaagcttgttttacaaaagtgcaagttaacttcctagtggttccagtatccttctgcatagatacttcggactgaagttcattacatgtgcaaaggctgatatttagtgagtgccctagtgcagttcttcctggcctttctcacattataacactctggggaagcaagatgaggcaactctgtcagaagtactggaccagcaccatctcccttcctgagagccaagggaagagtgtcttggcccagcagtgggaggctggctttagtgtttaatctgagaagcagatgaagctgggtcatcacacagctaatttctggatgatgctcagtgtatttgtcccaaacaaaagagcagttctcaaaacctagaactgactcagtccgtggacagcatcaggaaggagtaaccttttagctgtagagagacaacctggggagcctctggacaccagaggttggagcagaggctctcatctcagtcacttactgatcaaaatcgctcagagagctgctgtaatttttcctaacccctttattgagatacaattcacataacatacaatttgcctgtttaaagtgtacaattcagtggttttagtgtattcacagatatttgcagccatcagtcaccattacattttagagcattttcatcaccgcacaaagaaaccctgtactctttggctatcgttcccttgtcccaacattcaccccacccctaagcaacgaatgatctttctgtccctatagatttaccttttctggatattttagataaatgtaatcatattatatgtgagcttttgtgactggcttatttcacttagcacaatgctttcaagatttttccatttgtaccatatatcagtattcatttctttttatggcagaataatattccattgtacataaatactacattttgtttatccattcatctgttgatgggcacttgggttgctactaactttttgtctattatgaataatgctgctaagaacactcacatttttctgtggatacatgttttcatttctcttgggtatatacctagaaatggaattgctggatcaaattgtaactctgtgttttactgtttgaaaaactatcaaagcggctgcatcatttttgattctcaccagtaatgtatgtaggttcagatttcttatctgactttttgtcagaagggtgagaagtggttttgatttgtatttctgtgatgactaatgatttcaaggcttctttttatgtgcttattgaccatttgaatatgctctttggagaaatgtctctttagatcctttgttcatctttaatcgggtagtctttttattatggtgttgtaagaattttttatgtattccagatacaagtcccttatcaagagatatgatttgcaaatattttctctgattctgtgagttgtcttttttgctttctggatgatgctctttgaagaacaaaaggttttaattttgatgaagtccaatttacctatttttaaattttgttactcatactattggtgtcatatctaagaatctgttgccaaagctaaggtcatgaaaatttattcctgtgttttcttgtaagagttgtatagttttagctcttacatttaggcttgtgctctatttgagttttttgtatgagttctatttgagtttttgtgtgaggtaagagtccaacctcattcttttgcatgtggctctccagttgtctcagcatggtttgttgaaaagactgttctttcccccattgaagcgagtcatgattcccttgtagaaaatcagtttaccatggacacacagctttatttctggactctcatgtctattgatctatttttatgctagtcctgattcttattattttgtagtaaaatttgaaatcagcaagtatgagtcctctgattttgttcatatttttcaagagtgttttggctattccaggtcccttgcaattctacatgtattttagaatcagtttgtcaatttctacaaagaggtcacctgggattctgacagagattgaactggatctgtagcttttttttggagagttttgccattttaacaatgttaagattttaaatccatgaatatgagatatattttttttcattttacttggatctttaatttttctcaacagttttgtagttttcaaaccctttgttaaatttattaaattatttcaaaatgtttattctttttaatgatattataaatgaaattgttttcttaatttcattgttgggttgttatggcaagtgcatagaaatacaattgatttttatgtatttgtattctgcaatcttgctgacttgtttattagttgtaatagttttttattgggtttcttaggaatttctatgtacaagcttatgtaatttgtgaatagagataattttacttctttctttcaaatccaaatgccatttcctgagtctattttatgttgctataacagaataccatcaagtgagtaatttatattgaacagaaatttattttgctcatagttccagagactgggaagtccaagatcatgtcattggcatgcaacaagggactttgggctgcatcatctcatggcaggaggctgaagggcaagagagggtgaaagtgagaaagggagaaagccaagcttatttctgttttcaggaactcactcctgcagcaaaccactattttgataatggccttaatccattcatgagggcagagacctcatgacctagtcaactcttacaggtctcatctctcaacactgttgtattgggtactaagtttctaacacatgaactttgggggacacattcaaaccaaagcaccatttatttatttatttatttatttatttacttacttacttacttacttacttacttacttacttactgaccaacctacctattgttctggctagaacttccagtatagtgacagttttgttctttgacacttggagtatgttatttcattgttttgatggcctttattgtttctagtaaaagtgttaagagcaggtaattcttttcttgttcctgatcttaaagaaagcatttaatatttcaccattaagtgggatgttattattactattttggagatatcctctataaagttgaagaagtcaccttctattcctagtttgttgagggttgtttttaatcatgaaagggtttggattttgtcaaatgcttttgctgcatctacttaaatgatcatgtggcttttgttttttgttctattgatttggtgtattagattaattgatttccagatgttaaaacaaccttgcattctagggataaatctcatttggttatggtatataattcttcttaagtgttgctggatttggtttgttagtatgacgtttttgcagtcatatttataaaagatagctctatagttttcttgtgatgtctttgacgttttggtatcagagtatgattgggctcatagaacgtattgggaattgttctccttttttataattttggaagagttcgtgaagaattggtattctttaaatgtttgatagaatttaccagtggccctggcttttctttttggatagctttttaaagttaataattcaatccctttactcgttgttttcagattatctatttctttttgggtcacttttcgtggtttgtgtctttgtaggaatttgtccatttcatctaagttatttattttattggcatacagttgtttatagtgttcctttataatccttttatttctgtaaagttgttagtaatatgccctctttcagattctggtaatttgagtttttctttctttttcgtgtttaatctagctaaagttttgtcaatttttttatcttcttaatgaatcatcttttggtttcgttgattttctcaaatatttttttctattctcaattttattaattttcattctagtctttattatttctttccttcttcttgctttagctttactttgttgttctttttccagtgtgttagggtggaagtttagcctattgctttgagctttttattctttcttaatagaggcatttgcagctataaatttttctctaaacactgctgtaactgcactacataagttttggtctcttgtgtgtttgttttcatttatctcaaaatattttgttatttgtcatttgatttcttctttgatgcactggttatttaggagtgtgttgcttagtttcacatagttgtgaattccccaaatttcttcctattattgagttctaattttattgcattgtggtcagaacatacacttttgattatttccaccctttaaaatttattgaagtttgttttatggcttatcctatggtctgtcctagagaatgtcccacgtgcacgtgagaagaatgtgtaatgtattgttgggtggtgtctgttgcgtctaggtggtttatagtgttttggaatcctttatttccatattaatcttctgcctagttgttttactctgtattcaaagtgagatattgaagtcctcaccagtcattgtttaattgtctatttcttttttcatctctgtcagtttttacttcatgaaatttgatgctctgtgtgtaggtgtgtatatgtgtataattgttatatcttcccgacagatttactcttttatcattataaaatatttctctttatcttcagtaactttttttgttttaaaatctatttgtctcatattattctaaccattccagctttcttgttaatagaacaagaagggttgctgtttccataatacacttttcattttgcttttagcctgtttgtatctttgaatctaaagtgtttctcttatagataacatgtacttggtgcattttataaaaatctagtctgaaaaatctctgcctcttggattatttaattaattcacatttattattaagtctgatgttagcatagcatatattcatatagcacatgtgtggtatagtatatagtatactaaagaaagatgtagtacgtcatatgtatatacatataatggcatatatgttttagttcataaggtatatatttatagcttcattatattaaccttatttaaaatgtatttctggatatttttatttattcctgtggatttcagttaccgtctggatttcttagccgcatatatctctgcactcaaccacttccttcatgccgtttttggcaaatatattacctctctatatgttatagacccaaccatacattgcataatattgccgtatacaattgttatttagtcaattaagaaaggtgaagacatgggcattcattttgtctttcatagttacatattcacctttttggtgatcttgatttttgtcttgtgactttgaattaccatcttgggttatttgctctaagcatgcagaacttcttttagcatttcctgtaagccaggtctgctagcactaaattctctcagtttttctttatctgttaatatctttattctatattcatttttaaaaaatagctatgctggatataggatttttggttgacagttttgttctttgacactttgaatatattatttcattgttttgatggcctttattgtttctactaagaagtcagcttttaatgttatgcagtttcacttgtaatattcttgtaatgagtcatttttttcttgtctgctttcaatattttttccttgtctttggccttcagcttttttttttctatgatgtgtctttttgcatatctgtttgcgtttatatgaattggagttcattgagcttcctggatgtgcaggttattatttttcaataattttagaaagtttatattcattcaatatccttcaatatctttttctgtttcttctctttgttctctccttcttatattcccatcacccatatgttggtgaatgtaatggtgtctcacatctgagctctgttcattttttctgttttttttaattgcataatctctattaatctatcttcaagtttgttaattcttcttcctccagttcaaatatgcttttgagtctctctaaagaattttttatttctgttattgtgtttttaagcccagaatttccatttggttctttttataatttctatctttttatttaattctctatttgatgtgatgtcgtaatatccatctttacctctttaattatggttttctttaattctttggacatatgtataatagctactttgaagtctttgtctattaaacaaagaacaatttctggtcactctcacaggcagtttctgttgcctgcttgtttttttctttgtgtatgtgtcatattttcctattttttgcatgtcttgtaatttttattagaaactggacattttagataatatattttagcaaccctgggtactggtttcagcctctggggttcgttattgttatttgattttagtgactggctggattatcttagtgaagtctatttcttcccttctctgcccctcttcccaatatgaagcccctgatgctgcttttgcttttcagagggtaatgccttgggtagagcacagtcaacaagagcttggtctttttccctggctacaccaacccttaagtacccataagtatttgtttttgttttcattgttgttttttcgagatggagtcttgctctgttgccctggctggagttcagtggcatgatctcagctcactgcaacctccacctcctgggttcaagtgattctcctgcatcagcctcccaagtagctggaattacaagtacccgtcaccacgcccagctgatttttgtatttttagtagagacagggtttcaccatgttggttaggctggtcttcaactgctgatctcaggtgatctgcccacctcagcctcccgaagtgctgggattacaggtgtgagccaccacgtggggccaggcacccccaattgttgactgactattctctctttttttaaaccatgccgtggggcatgaattgctccacagtctgctttgatcaaatccttgctcttctgaagggatatttcccaaggccagtatttgagatatgtcctcctcccagctgtctcttcctgtagagatctgtccagcaaacttaccagcctacagtttagattatatctccaatgaatctatcagtcccttcccaattgttttccactacaacctccactattttccagagtgtccttaggcttgaacttatctacactcaattgcaactgaagtcagttcatttgggaagaaatttcaaactatttgttttatggcctgctttctcccagcctcccctgggcacaatcgctgagccatagttttggagctgggggtggggactatggcatgattctctcttagtgacatgtatgtttagaagttgagtacttagctcggtggaaggggagtagtagcctcaagtcttctcagcttgcctctcccagtgtggagcgttcgcctttcaagtttgggcaagagcaatcagggtcccagtcttctcagaaagtcatgcccaaaataaagacttcgagtgcagatgttatggacgaagggagccctcatttctcagctgtactcgcccagaacttagcttcagcaacaggcagctggtagcaggatgagaaatgctgatgacctgcccctcctgggatgaatgccctccaactgtgaactttggggagagagaaccctgtgttcttggccatataagcctagagtgagtttgtgtcttgccaaacttggatgagagagggagggagcaggtctttgttcaaacaccatagtgccttgctgttcttactgagttttagtggggtttcttgaataaatgtttcttcatttgctatatgcccttaggaccaattccagatactttaaatttttgtgttttttcttctttttttaataactttcaccagtttcactatggaacagttctgtggagctcttcatgttgttgtgccagaaatgtttaagttctcaagaagcttcttaaacatgcacatgcccctccacgctgtgggaaatcagaaaatttaagatgtggataaggcttggaaaaacccaggagatgttggtgtgcagccagggttacggtcactactgcaacatgagtgaaagcagaggctttgtatatgagtcacagccctgatacttaacagtttgcaatattgggcacagaatcacttaacagataaaaaaaaaatgggcatgagaatagtttctaccccagaaggttgttgtgaggattaagtgagttaacaacacttaaaaagaaaatatcaaatatagcaatatgtaacagtatgtcatataatgctaataaaatgatgatgatgatgtagatgtagtctttatatattgggttattcttcaattctaaccacaacttggatgtcctggtttcctttagtatcacataaaagcccaatggaaatgcccctcttgtacctgtgtttatcctgacccatattttcctttatgattgaaacacgaaaccttgcttatttcttttgatttgtcccagaatgaaccttacttatttcttttttggaagggtcagtgtggctgggcaaacacacgtttttttatgccagatacgtgtgaacctttcctctaattattcctgtccaggaatttgtgagattatcaagcagctatcagcttgtgggctgacatttctgtccttgtgtaattgccccttaaacatgcaaattcagatggagcagcccgtagctcagagccctaataaagaaaaatgtgacttactaaaaggcttttcctccattgtagctcaaagtcatattaatggatattagtgtggggacttaagtggcacgatcccatgtggccatgctggtgggagggagtcttgcctgtgtcagggagagcaggcctagaatcaccaacctgattagaaaaggaaaaacacctttaaccccctactgaccttttgtggtttcatgataccaaggcagcaaaagttccagaaggaaagttcagtgagccagcacagtgatggaactcagtcctctgaaatgacagcacaggggtgccaccatgatggtataccatgatgtgtcacctgccaagctacctctagtgttttctcatttatagatgtccttctacactttttttttgtataaacgtgggctcatgtagtatgcatacccgtttcttaacagtaggcgttcatgttagcggtcttcaacttgtcattctctctgtgccctgccaaatagaggcaagggtgccagtcttgggttctgtacctgtcacccacagcctgtatgcctcggacaagtcattctgggtctctgagctatgggggccaggactaggagacactgtgctacagccattaagaatccagctttgaagcccccaaagacctggatttgacccctgagcatgctgacatcagcggggtggacctggaagattcattccacctgtctggccttcggtttccttacctgtgaagtgggaatgatgttcctcccagttgctgtgagcattcaggttgttctggagaggcttctccctggcagaggtttacaggtggactgctcggaggctggcccagtcacttgctgtagagtacaactggtctttgaatttggtaaattttgagcttaaaggaaaaaaaatggccgtattcttgtcattaattatctttctttataattcttattatttttgttgtttcttatccagtttgggatgttaagtgatataatttttttattgctttactttggatattttagatttcacaagcggccatcaggaattttaggagtgtgtatttgggcagatgtatttagggtagaggtgggcaggcagacagcttctgtggctgtaggaatgtgtgttggaaatggagggagctggctgccaggctgcctttgcagtccattgtagacccagtccttcagtattgggtgaggtcctggattctaagcagcttgcaggaaagagctgacagtgcccaggtcaaagtcgtgggggatgtgaacatcttaggcaagtggtccctcctccttcacttcttgggattccttagcacagttcagtttctttgttgcttccttcagtgacaccaatgagactatgggtcccatccatgctacctccagtgccctgttcttgcatgcactgtaccgtatgtggtcacagctgggactgttctgcctgcgctgctggtggagctctcctggcccggcacttggtgggtgctccatagttgctggttgaaagatgcaagatttgatgagccccgtggagctggaaaagctgacactatgtacctgtgattaagttgagagggaatgggaaaggactgtgtttttcccactccgaagggcagtgagcacatttgtgtatagagctaatcagaagcaaacctggggaaatgtttccttcatttcctcacaagaccagcccagacttggcatcacgtatcttcaaagtaagataggaaaattggactcaactaatgtaacattactatttttgaaggactcactatacaccaggcactgggctaagtgctttaaatatattatctccttcagttctcacagcagccctctgaagatcagctctgttccatccccctcattttataaatgaagaagggaactcagagacgttgtttaactggctgagggttacacagcccattcgtatgctcaaccatatgcaatattgcctgaatgtgaaatcttctgtaggaaatgaacatctgggagattgtgctttgttggctaagctgaaaaaagctgtgtcctcttgtggtctctccctgagtcatacacactggcaccactgagaccggcctagctgtttctcagggctcaggtgggctgaacaggccagagaatactttcctcccatgctatagttttgaggagatgaatcttcttttggtttaaagaacacagagttcaggacacccggaataagccctttaagagcctgcagaaacttgagctggcaactgccatggcttttaagatgtgatggtttgctctgtcttgtgtgctggtcgaggatggattattcgaagctgtgggaacagctgacatgctctagcaatttgtctgaatcttgtttctgcatttcctgcttacagaagaggatttttacatacctactgattgtagattatcacgtctgcacacctgttggggataaacttgggccgggacttacagtgcttcagaattacaggtagtcctggcccagctgcctcttggaggaagttgatagggaagtatgacggaaggatattcatagttccctttaagtggcaaattgaaaaaacccacttaatcaaaaaaatggctgtggttcatcatgtttcaatctcgttttgagctgcctctataccctcagaagattttttccccttgtgcaagcagaacttttgatttctgtcttcatttatcagcttgcagtgaataagcttgtctctgagcctggcaatgagagcctggctatggaaatgtcattctggtgagggcggcatctcttgctgtgtggcagagtccaggagaagcaaagttaattgtgtttctgtgatgtccgggttcggaatgtcggaagtcatcattccaagtcagagggattggctagttactgagaaacttgaattgcttgggtggaatcctgaccaagaggactttgaggcagaggagacaattttagaaatttgcagcattggcaaaaataaaaaacggatttttgtctattcatttgccatgttgtcactgcgctagtcaggtcagtcttcctgttctaaacataaaattccctctgcggatggtcagggtgcctggagcaagcagagcagttgcctttttcatttcacccttggcttggcagccggtgtcttgcctctccgcgagcccacactgcctctctcacctcattttccatcacttgccatcaagtctccacagtgagggtggctttctgcctgaccctgtggatgccctgcccattttctttttttgtttgtatcaatgtagggggtaaaagtgtggggaagagaaagagagatccaattgttactgtgtctttgtagaaaaaggaagacataagaaactccattttgatctgtagaaagaaaaattgttctgctttgagatgctgttaatctgtaactttagccccaatcctgtgctcacagaaacatgtgctgcattgaatcaaggtttgagatttagggctgtgcagcatgtgccttgttaacaatatgttaacaagtacagttttgctgcatggatacattgagtagtggtgaagtctgggcttgtgatgtaaccatcacctgaatagtgtacattatacccaataaggaatttctcatccctcaccccgctccaatgtttaccatatctattatttcattctctatgtccatgtgtacgcatcatttagctatcatttgtaaatgaggacatgcactatttcactttctgtttctgagttattccactgaagataatggcctctagttccatccatgttgctgcaaaagacatgatttcattctttttatgggtgagtaatattccatggtatacataccatacattttctttatccagtcatccattgatggacacttaggttgattccatatctttgttattgcgaatagtgctgcaataaacatttggatgcatggatctttttgatatactgacttcttttcctttgggtgtgtacccagcagtgggattgctggatcaaatgataactctattttcagttctttgagaaattttcatactgttttccatagaggttgtactactttacattcccactaagagtaggataagcccctttctctgcatcttcaccagcatctgttatttttttgactttttgataatggccattcttactagtgtaagacggtatcacattgtggctttaatttgcatttctctcatgattagtggccatgcccatttcctcctcagggtttcagcagacttgccctcctacctgcctgacatcccatctgtccttttcctgtctgtctaaaccctgtctgctttcaaagccacctagcctcattcctgaaagcttctcaaatcctgtcaaccttagagctcttacagaaattggtggtggaatgatgcagtccgtggtttactttcttgcattgttctgagtgtgctggttcctagctaggttgtaccatggtaccatgggctaacgtattttcttttctttcctttttttttttttttttttttgagacagagtctcattctgtcactcaggttgagtgcagtggcacgatccaggctcactgcaacctccatctcccaggttcaagcgattctcttgcttcagcctcccaagtagctgggattataggggcatgccaccatgcctggctaatttttgtatttttaatagcgatggggttttgccatgtttgccaggctagtctcgaactcctgacctcaggtgatctgcctgcctcagcttcccaaagtgctgggattacaggtgtgagccacagcacccagccatctgatgtgttttctgtcaagcatcatgctcactcaaaagaggcactgcataaatacaacaggatgtaccaggctcgaaatattggtgctctaaggtctttagggaagaagggtcatggtgtgtgcagtttgtcttctagtggtttgaaatggaaaatagtgtgtgtgtgtgtgtgtgtgtgtgtgtgtgtgttaatagggtgtgtaaatgttgaagcaagtgggataaagtgttcaaaataggacaatctaggagaaaaatatacaggtgttctttgtgctatttttattcttgaaaattttctgtgcatttgtgaatgtttccaaataaaaacatatttattaaccactgtggttatcctggagccctctcttgcacacacccacatcctgtcccaccagaagtctgtcagctccctctgcaggacagcttccattgccaccctccttgcacgctcttctggtgaccaccctggtccaggctgccgtcttctctcgcctggctggctgtgattgcctcttaagtgacagttcttgcttgcacctctgtttctggacagtcttttctcgacatctcaaaatagccagggtaatcttttttggtggcagaattatgggtagtttttaattcttcttttgttaaaatttttaaaattgacaaataataattgtgtgtagttcaaggtggtctttttaaaacatgcatcagattgcatcacatctccactcacaactgtaaccttctgatagaagagcttccctgccctcctgccttctcagagctcatttcctcccctgctcactcggagctgttcttcaccatgtgaagctcatcagcacatggtggtcttcccacgcgatgctccatctgcctggaagcctttcccgctgtaatggtatatggcctctctctcttcattcgttcactccatttgtttaaatgctacatcctcagaaatgctgtctctgaccaacttcttaaaaaaaaaaaagaaaaaagattctggctgggcatggtggctcatgcctataatcccaacactttgggaggccaaggctagaggattgcttgagcccaggagttaaagagcagcctggccaacatgacaaaacgttgtctctacaaaaaaaaaatagaaaaattagccaggcatggtggtacatgcctgtagtcccatctacttaagaggctgtggtgggagaattgcttgagctagggaggttgaggctgcagtgagctgagattgcaccactgcactgcagcctgggtgacagagctagcctctgtatcaaaaaataaacaatataagtaaaataaatgattcctatcttctccgtcattcccaattcttctctgactttattttttcatggtaaaaatgacccatttgccactactgaaattgttttatgcttcatcattccagtagaatgcaagctccatgggggaagggctttggttcattctctgctgtatttttatagcctggaacagtggctcacatatcgtggtcccaaaacaacagcatcaatatcatctgggaacttgttagaaatgaaaaattctgggtcctcccccagatctactgaatcaaatactctggagagagtgcccagcaatcttgtttttttacaagtcctccagttgattctgatgcattttaaaatttaggactcactgctttaaaatagtgcctcaaataaagtaagttctaagaaatatttaaatgaataagcaaatattcagtgtccttttgtgtcacactgcctattttttgttgttttcttgattcataaacttaccattttattctataaaagcataagtttttcattataacaatgttcatgtgtcagttttggactttgtgaggattcaaggttaaaatatgacttctatttttattctctctgtgcctgccatctcctttgttttatgtggatgttaagctattatatccttcattgatttacatttccaataatggctgtaattgagaaaacagaatattgagaactctaaattattaataattatagaggtatcactttatgctgttgaatatttattaagagaatatatgatagcaggctgtgtcctgagctggcaaactggcccaagctggagttcacatcaggacatattgtccaactaaaagtagaagctgcaagatggacaggtcacctgtcgggaggctgaattatgtctgatgtgactagagcctgtgctggtcaatttgtcagtgtcagctctgaactcattcttgtctggaaaacagatgaagtggccaccaggtagaatgacccaaaataaaagaggctaaaaggttatctgttggaaaattagaagtttcaacttacagaggatctcttggagatttcactgctaagagctatttagacgtgactgttagtggttgtgttttatgtattccatctaaaaatgtgggctttctacttgaatcaccctaaagcagcaaaaagttattaaaaacatccagtgttcagccttgacctctaatcctatgatatagagctagtgaaaaactgccaggctgatagtggcatgccgcatacacgaaacaggtcattatatgtagggggtgataaaatagactggcatttatcagtatagaggtggtcgtcctgggtcattggattataggttgcccttttccttctctcttcctgcactttttggattttatgctgtgaacatttttgtgcatgtgtttggaatatttatggttaggttggaacactttccatttgtttatgaattgagatatgcagagagggagcaggacaatctcaaggacgatggggacccaccccacaagggattatccatgctcctatgatgggaactcctccagaaaccagccaggccaacagcccagtaatgggcaaatgtgttctccacagggtgaccgcatgtccccatgtcactcttacttccatggctcactttgctgctgctctgtgagccagctctgggtaggtggccagtgaacagactggccctgggccacagccagcaggccccaaaagcagagaatgccatgtgctgggggagtgatcctagccaagaatggggtgagatgaggaccctgggcatttctgcagagcatctttcctctgtctctttctctcactctgatagaatagctgaagcctattctcttgctattattagagcagctgccatgcatcaagtgttcttgggtgcccagcgctgtgtcacctttggagaagtcccttcccctttcccacttgtgaaaggtggctgtctccacctcacctcggtggcggagatgcagtgccaggcgccaggcagactgttgcgcatgaataaatgctcgataaatggctatcactcctgtcaataacaatgactctctcttagtcctatcagctaagtattgttatcctctttttacagataaggaaaccaaggcagagagagagagagagagagagagagagatggaagaagggagggacaggcaggcacagagacacacagagcagaggattgcaggcatgttgatcatctcatgaagagctcctctttggccatgtgcgcgattagggttaacttttcctggaacttgcacactgactctgagggcagaggcacattatgtggtggtgaagcaagtgggctctggactagagggcatggttaaattcttgccctcacctctccatgcttaggaacttggaggaaatgcttcaaacacacgtaccccgtcccttgcttgcctctctgtgaaatgggggtgtaatagcactccctcattggagtcacttattttacaaacattcagtgaacacttactatgggtcatgcacttgcagggaaacagctccaccatggttgtatccaaacagaataatggcagcaattatgttttgagtgcctactggagcgaggccctacgctgagcaccatttctactgagttatccctgatactcaggtcacagtgggaagaagacatgggatgccacattttacagggaatcagagggttcctacctgttcatggacactcgggcatagtcaagtagggatttgaacctggctgtttgtttgccttgaggtcctcactccctgtggttaggcagcacctacagaaactgtgagacaatgcttgggaagcataccagcggctcactccggacctgagctgggcaccatgtctgtgggagagctacaccttggcctttgtttctggccccgacttgtacctggctgagacatctctgttcgttgctctcatcctccatgcagaaatctgagagggctcgtggttcctctctgtgacccacactgggaccctggctgtgtgctcttcattcactaacatttttcacccaggagtgctccaccctgcacagtcacgtgagtgtccacctggggagtagaactcaggaggtgatctgggctctggtatcaaacctgctgagaaccagcttcagacaagtcacatcacctccttgggccttttagattacttaaggatctgccaaccctgccactctccaccccatgggctgctccctagcaccccaaggttgcttgactgagagcaatatttggcaagttaaattgatgtggacattaatcaaataccaccatactatcagccaatgaatcccataccagcctgctatgaatgccttcccaggaaactgaacagctctgttgtgttctgtgctgttctgttctttttctcagtctctctttcctccccctcctccagcgtcccttgggggagtcctcatccgttcatgaaggaagctgtgttaggcatgccctcatggctaagagaagacagagagcacccttgccccttcacagcttctttccctggccttgtgggctgtaatgctcctctgacaacacaagggggatttgaggatccaggcaagcagagagagagaggatgccaagcttctgggcattcacaggggctacctcaagggaaggccggctttctcctaacagacttagcccgtgttctgagggattcactgtcctcccatgctgccttgtcttcattgcctttggccctggtgcaaagatgcggagaattatgggggtgctccataatttctgtacaaggtgcatccatgtgcatgagtgacccctggcccatttctcttaagggggcgggaccagaagagtccatactatatgtatgaatttgtcttagttttgaactttggaaatgtggccccagtaatttacttattctctctttacgttggtttctgtcaataaaatgtggtcaagaggacttttctcgtggctctgctgctaactgtgtgaccttggacatgttacttggtggcttacgttcacttttgccgtctgtaaaatgagaattacattagtactcaccctagagttgttttgattcaatgtgttgtcatccatagctgtcttaggatagctccttgacacatcctgaatgctcagttgtgtcggccgtgttcatgttccactagctcctagtagggtcacctagggcaaattacttaagccttctatggcttcagtttcctcatttgtaagtgtgcataataggacctttatcatagaggcttaagtgagccacagcatgaaagtgtttagctgagcaaatggagagtgctgtatacatgaccagtgttatttttttagggagatgtgttattgaaagtgcccctatttctccttctcctgtgttacttcttattcaaatgcagcctagtgaacagttaatggtgccttgcccaggaccatcagtatcctgttgcattttgaaggggtgtgtgtgtgttgtatgtgctaaatgttttcttttgctttgtgacatttgtgtggtgtgtaccctatttccatgtgaaggtgtgcgtctctttgccttccgctacttttgctttcctgaccaaagtcatctcaatctcagttgaccaggtccttgtggacacacacatgacagtgctcacagaagtgaagggtgagaatatgttctgaatagtcatctctgttttcaaagctttattttttcaaaattggtaaagctcaaaggctggggcaggcagctcacaaattgtgagtgtgaggggctcctctgcttgattaaagaaatttctgaagaaagaaatgtgtttaactgggagactggtgagatgtgtcagaaagtattctctgcgccagccagtttgtggccgggtattttaggaccagttttgcaaagctgctgacgagcaggccctgcttctgggttggaagagaggaaccgccatccattttccctaaaagaagaaaaataggtgagcctggaaagtctgtgggtaggagtgaaataatcaccaactcaatttgcagccgtcttggaagagataagctgttgtttcttcccaagtgaatttctgcaaagaacagatcctaccaagtgagcctcatctcctctaatcaagtggtggccgggctattgaacatgatgattgtcctcagcatccctttcacttggcctgtgaggcagagctggagtcttggcagtttatggaaataatgatttcctgcaagaacttccaattcagcggcatcctcaaacccagatgcctccctggataacagcgtttctcccctggctaacagactgatgactggtaaatgttgacctcaagtaagaaacaatagtgaactgcgaagctgctgctaagctttttaaaaataattgaagtaccaaatataaagctaaatataatttgccgttatcttccccaagataccatgggcattttgaatttgatattatttttcagaaataaaataatcattttcatctgctaatgttgtctcatgttaaggtaacgtgggaaatcgtcagacaggactcacaacccagtcattgttccatagtatgcattggtcgggtatatataaaatggtcgggtaaataggtagtggttggattctggtgaggactcttttcctagtttgcagttggctgttttcttcctgtgtcctcagatggcagtaaacaagcaagagaggaagcgagctctcttatgtctcttttttttaaaggcactaatttcatcatgagtgttccctctcatgatttaattaccacccaaagaccccatctcctagtaccatcacactggggattggggattattgtaggtatccccacaatctatgaattctgtggggacataaacattcattccatagcagtaaccttatatgaaaaatagggcctttgcagatgtaactagttaaggatcttgagatgaagtcatactggatttagagtgggtcctcaatctaataataggtgtccttttaagaaaagggaggccgagcgtggtggctcacgcctgtaatcccagcactttgggaggccaaggtgggcagatcacgaggtcaggatattgagaccatcctggctaacatggtgaaaccccatctctactaaaaatacaaaaaattagccgggcgtggtggcgggcgcctgtagtcccagctactcgggaggctgaggcaggagaatggcgtgaacctgggaggcagagcttgcagtgagctgagattacaccattgcactccagcctgggcaacagagcaagactccgtctcagaaaaaaaaaaaaaaaaaaaaaaagaaaagaaaagaaaaggagaaaagggaaagacacacagaggcacatagagaagatggtcatataaagatggaggcagaaatgggagtcatgcatttacaaaccaagcaaaaaggactgccaacaaccacgagaagctaggagaggggattaggacagtttctgcttgacagcctccaaaaggaaccagctctgcaaatgactttactccaggcttctggcctccagaactaaggagtaagtttctgttgttctaagccaccctggtggtggtagctttgttatggcagcccttggacacttatttagacatgctacaaaataactagccagggctcttctgagtcttgttgggcagtttctcaagttaccgtcacgtggtgctgccggaggaagtggaaagcatcaagaaagatcatgaaggatgaagaaagactgaggatctgtcctgaattagagactagagaggcaggcaatgtgtagtcctggattgaagctaggcccagacaaggacattgatgaaatttaaataagatctgtagatttaggtgatggtttcatagcagtggcaatgttgtggttttgattcttggctgtggttaagtaagaggttaacatttaggaaagggtgtgtgtgggtttttttttttttcgtacaatttttgcaagttttttgatgtttgaaatgtgtattagtcagggttctctagagcgacagaactaatatgatatatgtatatgtgaatgagagttttttttgttgttgttgtttttgttttttgagacagagtctcactctgtctccaggctggagtgcagtggcgtgatctcggctcgctgcaacctccgactccctggttcaagcaattctcctgcctcagcctcccgagtagctgggattacaggcacgtaccaccacgcccagctcatttttatatttttaggagagatggggttttaccatgttggccaggatggtctcaatcttctgaccttgtgatctgcccacgttgtcctcccaaagtgctgagattacaggtgtgagccaccacacccagcctgaaagggagtttattaaggagaattaactcacataggcacaaagtaaagtcccacaatggaccatctgcaagtggaggagcaaggaagccagtggtggatcagtctgagtctcaaaacctcacaagtagggaagccaacagtgcagtcttcagtctgtagccaaaggcccgagagtccctgcaaaaccactggtgtaagcccaagaatccaaaagctggagaacatggagtctgatgttggagggcaggaagcatgcagcacaggagaaacatgaaggccggcagactcagcaagtctacttttccaccttctcctgcttggtttattttagtcacactggcggctgattagatggtgccacccagatggagggtggtgggtctgcctctcccagcccactgactcaaaatgttcatctcctttgccaacaccttcacagtcacaccgaggaacaatactttgcatccttcagtccaatcaagttgacactcaatattaaggaacacaaaattatttcataatgaaaattaaaaacagtatttctatttgtttataggaaaaagacaagagagaatgaggtttgggggaattatcttggtcatattcgttggaattaccttgacaagcgaacacctcatgtgtccacttttatagtgaagacacaggcttcacctctcagttccagcctttttctctttacatttgtgaggaagttacatttattccgattaatacatatcccttcaaatactctaggtactaaaaatctcactcatgaaaacagacccttttacttctccctacttgaaatggaatgctatactgctgttacagatcagagcgatatgcacatggcttgggaaattgataaatggaacaaaaaggtcggagggtggcgttaggttgtaataatcccatcttagtacaaacaaaatgtctttccatagttagaggaggaagtaaactgtttcacatcaggattttaacagtggttctcaattgcatagggtgactttaatttcctttctgatcatttgatttttttaacagcggatatttttgttaaccaattaagaatttatcttttaagggaaagaatgaaactatttttaaagggtgatttctacttcctggccctccaaaaagagctgtatgtctggtttaagatgaaatgcgctcagtgaagacttactgcagaattcatttattattccactctcctgccatgtcgcggctgaggcttggcctctctccctgttcttggaggtggccagtgtgacagcacagcttgtgttttggtggtcctgtcaggctagaggaccccactgaggaatagtccttggctcaggacctcaagattttttaaaaatactcttgcattttctttatcaaaaggtctttcttgtctttctctttggcacaattaaatagattttagaatttgcagttgagggtcctcaatatattcaccccaagatgcctctgtgcatctgttatatatttccatgttgtttttgctaatagttttggagagatttaaaacatttgaacctttttttcttgctttaaagacaatgtctggagaaagttaaggacctagaaagttattaatttttttgttccccttgttgtactgtgtagttagctgctttcaaaacaaaaaagccttgtttttctttgtccttcttttctttataaataggctttgagttattcaagaggattgaattgaccctctggtatgaatttttactgatcccatatgctaattaactatgttttatctataattcaattgtaagagataatatctccatatatagatgataagtacataatacatttagagagtgaatattgaataacttaatattgaattaaatatctgtttcaagtgacatgtttgctcttaaataattctaccttttaatggtgggttactgttttgaaacaggctttattattctatctttatatcttttgttattgttgttcattcctccaatcttctgatcttacagtgaccaaactagcctttttttttttttaatgtttttaaagatacagggtcatattctgttatcaagactggagtgcagtggcatgatcatagctcactgcaacctccaactcttgggctcaagggatcctcccgctttaacctcccaagtagctagaagtataggtgtgcaccactgtgcctagtctagatttttgtagggatgggggtctcactatattgcccaggctggtctcaaactcctggcctcaagcgatcctctcatctcagcctcccaaagcatttggattacaggcatgagccaccatgcctgacctcaagccagcttttaaaatttttactttgtaacccttgacctggcatcatggacggtccttgctttgagacattctatgagtaacagagttttcagttcttaaaaaaaatttattatattttaattatgtaaatgctattgaaatagcaactttaaattgacatgtccattaattcatatacaaagtaaaaccaagctgtttaaaaataatcatcaaatagatcaaatggtaaaatcgtggaggattaaattaaaaaggtgaattggatactagctgcatagatagcatgtcttgtttctagttacctgctgtaataaaattagtcatcaaatgcgttaggactcttaaatgttaccaaggtgtgatgtgctgtgtacttctggccatttaaaatatgttccaaactaacaaactgataaaatagaacaacaccatgatacacaagttttagcacctatattgctagaagatctttctgaattagtttattttttcaaatttgaaaataataaagtttgaactactcaaaatttttaaaaatatttccaacccttgactttaaagcatgttctttttaaaacaatttcagctaaaatttctaagtagttctgtccttgaagatacttggagcttaacttccatttctgaaggcctgtccttgtcatatatcatttttgtagcagctggcttgttccactcttggtgtacttcctgttaaatatgtatggcttgcttggttttattttagtagcagtaacattttcccctttttcattgttatttgcagcatgtaatctgctggacttgcaacattatttcccacgaagcacttctttcttttttttctttacatcccaagagatctgtgtcttgcattaaactttccttgctggtgactgatacagttccttttatctgccatgcagttttagaatgccaacaaatttcttgtacaacaatatggtatggaagtgcttcacttggggaatgatcctgaccaatttaaatcccttaactgaattagtgacttggttaaatcctaggttccttgggttgtatgacctctgagatgactctgtgggtgtttgtgacaatactggaaacttggaagagatgtttatgtttggtgaccttatcttcttcttccctgtggtctttattctggcaccttgaatttcgttcaggaacccatctttcaggactgctgggcttgcattcagatccaaggcttaataggtttaagcaggttggcatgctccatcaccctcctgtgctgactagttgagggatgggcatacaatggtcaccgtccatgcagtcagaagacatctgaagatcccctattctgcctcggtagggttaggaaaagatgtgatgactgtaagtgctatggcaattttgtggccctataaggggaaaggctggaactaccggacaacaggggtcgggggaagggcctggatgtgtgaaaggaagaacctgagcatggaggcagccctgcaggatgcagaaaagaaataaagacagaaaccaggtcactggtgaagccacgggcaatgtctggatcattttctccacaaaaccatttttacccctcatttttgtagttccttgggctaatattttgaaaggtattttgagtaggtgtgtttggttccttatattgggaagacacctaacttgaagaagtagagagcactgacataattacagtagaaatgcttaagtagcctctacctaagcaacttagtagattaattaatgttcttcctttcttcttccattgataaaacactttggagggctggtgtctagagcatgcagaatgcccgcagctggtaaacctcccccaagactcaaaaggtcatgatcctgcatgtgaaggctggctaattattaaaagaaggtgtttaatgttttttgaaaatgactccttgctataatcttttttggttaaccaaccaactgcgtatcatgattacaccagagatcaacacatgcacacacacacgcgcgcacacacacacacacacagacggtcaaccagttccattctttatggagtggagtgaattataaatggaaggcccattcatcttggtttgctcagaataagcctaatttgtactctttgtttctgtgttaattaaaagactcccatttcttctcaaaagtggtccagtttggatgatcaaacatttagtcatcctggttataagtagtttaatagagttaaatttgtactcttttattatttttaatgaaccatttatatgacaagaggaggggatcttcaggcacttgtccgtgccactcaggagttagcagttagtatataggagctacagaggtccataagctgagtcatttggtctcatttaatttggcttcactgctgttgttcaacaagccaaagaaatagttgataaaggaatttatagggtgaatgaggtccagcgcaaagatggctggagtccttgttaatagttcttggctaacattactggaagttggcataattcctagcgtgtatcataccctttggaagcagtttaaacttccagtggtatagttcagggaggtttacaacctgtagatctttgcatgaaattgggcatgtacttacaatgttctagccatgagaacccaggcccctggcaccatgtccatcaaaaccacctcagcacaaaattggctccctccctggaactctgggaggggccagatctcttgtgagatttgctcacagatgatattgcccacttcttggaacatctttctgaactttctcaggccaatttctgactcctgcttacactctcccgtgggtagagagctagaaatgccctttgttacgtggccacatctacagttttatgttttgggggctgaatggattcagcagtttgtcagttgcagagcaggaagacatagaggatttatttatattttaaagaagaacctcccccaacccttttttttttttttttttttttttttaagagagacagggtcttgcctttctgcccagactgaagtgtagtggcacaagcatggctcactgcaacctcaaactcctgggctcaagcagtcctcccacctcagcctccctagtagctaggactacagggatccaccactgcagccagctagttttctaaacaataataataaatgcagacatggagtcttgctatattacgcaggctggtctcaaactcctggcctcaaatgatcctcctgccttgaccttccaaagcactcggattacaggcatgagccactgcacccagcctaaaacctcattttctttatacaagtgatgtgttcacatgacacctgccactccacacattgttctggacagtgttaaggctttggtgtggagtgactgaggaggggaactgggaggagctgagaagctttgctgctctgagctatgggaactgtatttccccagtcccagcaggtcatgggccacactcaggacatctccagtcctgcccaacacctgtgtgattactttaagcttttctctaaatgacttactctttattttcatctaaataaatgtagccacattaggagcaagggattttgagaattaagagttagatgtgttggttaaaatttctccaacatcatgaaatacataactgctaaaatctttaaaaggttgtgttctacctgaaatcactgacataggagggaggagcctttttccacccatggttcaagcaagagatcaagatttctttattctactaccccattggctatttgaagctcagacctctagcagcagttcctttcctaggcatttaaaaacaaattaaggggcagatgctcccattaccagacctggccattctgatccccaaacccagtacgttcagtagacaccaccttcttcctcaccccacctcttccagttacaaaaaccaaggctccccagcgtttcaaaggatgacaggggatcctgatccagggaccgtctccattactactaccactaccaccatggtgcctgttaaaccaatgacagcagacctgtgggcaggacttgcaagtgcatcatggcacaaaggcattcctttaccctcctcaaggccgacttcaaattcccactgtgttggacgtggccctgcagtggtccatcttctcttcttcctcactcagagctgacctctcctcctaattcatctggtgttcctcatcccaatacaggttttcaggctggtgacgctgtgacagatgttaaaagcagcacgtaatgcaaattccagctatacctcagtaaagctgtttaagaaacaaagcaaattccttttccctgtccccttggctccccatccagacctctcttagaagcaggctcatggttgcatattgtctctccaatataaatctcatattagaggcaggagagtcagcacttggccttttgctgttaaaaacaaacaacaggccaggcatggtggctcccgcctgtaatcccagcactttgggagaccgaggcgggcggatcacgaggtcgggagatcgagaccatcctggctaacacggtgaaaccccgtctctactaaaaatacaaaaaattagccgaatgtggtggcagacgcctgtagtcccagctactctggaggctgaggcaggagaatggcgtgaacccaggaggcggaacttgcagtgagccgagatcgtgccactgcagtctggcctgggcgaaagagcgagactccgtctcaaaaacaaaaaaaacaacaaacaaacaaaaaaacaaacaacaaacctgaacttgcccccgttccctttttcaaatgtccataatcccctgatctccctgcgtgccgtgtctgggcccacggaagccgtgactgtgtagtgacgtgtgatgctgctccccattcctttcccacagccctctgctgcccacatgcccccagctgcagcccccgcctttctttgtccagtctgcggcttctatgtctttgctccagcagtatccgtgacagctccttaattgctacacgcatttgtacagttccttggcaattatatttcagaccctgtcagggtacctgctagcctcggggctgtgtttatattaaatatcaataaaaagctgatagcatcagcccagatggcaggctcacaaaatcatattttactgggagccaggcctgtctggaagatggaaggaaggaatgtttaaatttctttctctcttccgaaaggttaaaatgagaagagacttccctgagtgaatatcaggaatcggttcttgctaaatgatgacagctgtgtactctctaactgggtgttgtcctttattgtaaatgacttgtcatctatcagttctttccagaattgtttcttttgtccccccgcccccacagagcataggacaaggcttcaaatcccataggtattttttaaattctggttgacggaatggctaagagtttatttggctttactttatgaggagggcttaggacaaacgccaagggttaagtggccctgagcccaccccatcctgcatcgcccgtcccctgcatcccctctgctgagggggccatgagagaggaacccacgttactcactggctgtgtggtgtttccttgctgggcctcggttccctcatcctccagaaatagcctgggccttccccggagctgtgagcgtgatggagtgcgagggggccgagcagctggcaccgcgtggcgcagtggctcccgccaagaaagcaccccctggaggtttcacacccccaaatgtgggcggtcaaggataccacttccctatggtttccactctttcatgctgctgatgatacagttctgtctattggagacagacgggaagaatggcttgaagggattgcattttgaggacagtttcaacagggaaatcagttttagtctgcaaatctatgacaagacagctttttggggacacgtttccctgttgcagtcaacagaatttcccatttacgtgtgatctaaggggcatgcccctccccttggctcatttccccgtggtatagtgattctgcagcatggttgtcctggcttcctgctgtgggggattccccacatggatgctgggacagtgcagaagagagcttcaacagctggcacagcacctgccttcagtgcaaaacctcgaccaacacgtgtttgcaagcacatcctctctgtgtcccactggcttctctccctctgccacccttgtacaggtgccctcatgtatcccatggatgactgcaggagcctctaaacactcccctccacccttccagcgccactcacctgccaccacttggttgctctctcaatggcaaaggaggaatccactcctcttgagattgaggacagactgcagacccaggtctgcaaagccctacttggttccccctgtccccatttctcaccccagcctcctttttatttcctgcattccaggcacttagacttcttttggctctgccaggaccactctacaacctgcccaccccatgcctctgcgttctgcagattccattttaccccaatgagctgtgcactccactaggtcaaaggccgtgtctggttttgcccactgttttgtctccaaatcctagcaggtgcctggcacacagtgggcattcagtaaatattttctgaatgaatgaataaataaatgcatactatatccagtataggtgctaaatgctttggggatattagaaaatatgacatgatttaataccctttgggtgggttgttcaatagttgtaagagttaacgtaaagggaacaatcagacgatgtaaaagagaaagcctcagtgagcttgaccagtgcagatttgggtgtatgttgggagctggagggaaagtggatttgtttccaaaaggggtcctgggccagatcagaatggtgtgaagcctcaggcagtgggattaatctctctgtgatgagttttcaaaaactactgatgcttctggaacagcgtgggtgctctggccgtcgtgttcagcacagattttcaagcaaaatgcttgagttccaaagagctgctgtgacagttttgcaacactggcattgttctagtatttgctggtgggaaaagagggattctgtgctcaccccatttctgaacctttccaaaatgagccttatgtcctttccagccagagccaaaaggaaggagtgggttcctcagcattttgttagaatggaaaggtgacttagtgatggcgaagtatcatgtatcaaaagaggtgttttaaattagtgaatattagcttaactacagccaatcaaatgccattttagaatcagaagcctcttggaatgtgcctaagttcactctacagtattttagccatgattttatgccttgtaaatgtcccctctaccagcatacctcaagtccaaatgctgatagtgatgcagtagcctcactggcctgctttgcagcagagaacctgggctggatgcatctaggaactctcggagggggactccaaattggtacccagtactactctatcttcatccatcctgccctctttaatgtacgcgtatatcctgagtattaagtactaagatgtcctgtcagggccccaggaaagcctgagggagccccctcttctaggtgtcacctaattatttgatgatggctaggagctggcagcctcctctgagccacgtgttaccctggtccgtggactgcgccttccctgccattgctttctcccaccccctgtgtactgtctggtagccagtaaatagagttcaagtcctctgttatctaggagtttttacaggaacttagcaaacttccgctttgagcaaggtaatgtactatagcaatggacttcaaagctttggggatagatttcctcatctgtaaaatgtggctaggaaaagtagttcatgactacctggaaagggccacacatagtgtgtggcacattgtaagtgccccctaagtggccatctctgccgctatcatcatcagcatcatcatgatttctgtgatacaattttcttcttaatgtctctaaaggagacttgtgaatggtttattccaggagaatgaggaagaggaaatgcaagtctctccacaaaatttaaaatatatgaagggagaaagactatttaaaattgatatatttatggcaaaagaaaattctaatcattcacctgaattctaattagaattctaattcacatgaattctaatcattcaccagggaatgaagcctgaagtgtagcataccaaggcaacaggctgagggagactagagcattctctggaatttgccaagccatttgcttcccagctccatccggagtggttcaacattgggccatgaatcctccttgtccctctggtcccagggctgccagaaaatggctccagctttgtgaaaagcaacctgcatttcatgtctagcatatcactaagtttagaggaagggtaaatgtttggcaaataaacctattgtataattcagcacacattaaggactattttccaatagatataagtgcttgataattagcatcaaaactgttcattatttaatctatgatctacttagaatgaatgggagagatgtcatttacttgctgaaatgggagacatgaaaactatccaaccattctcgtcttgaatttggtccaacacacggcacagaagaaaactcctgcgtgggctcaatccccaggctcccctgcctgctataatttcatagccgagaggtgcacagctttgaagacatttaggaaagacagagatcctttctccagccttgtttaaggcaggcatctgcacaggggccacactttaaaaatcctgttgattctgagctgagtcccttcccttccatcagtggtttttgggtaaatgtagtttgtctctaattctgtgttagcttataattgttcttcttcattcagattccctagaagctgacccattttttgtggtagaaaatggcaagtttaaattaatacagttctgctaattcggtggagaataaatggtattggggaaaaaaatcaagtgtgtatcagatgactgaggtctggagtggaaactcaagcactaaggcatccatgaagtttctgattgcctgtcctgggaagaggaagtaggccatgctcgctacagattttggaaaataaatttgattttggagccatgcagaaaggcatgatggaccttggcatgggtggaatacagattatgtctgctacaaaatgcattgttggcaggaaacttgcctatctgctaaaatccttgccacgacctccccacctctccagcctcatctagtacctctcgccaagacaccagattcttcccaagtcagggtttttgatcttgcttattcactctgtgtacaaagctcttgctagcgtaggcatttgggagctggtgccatctcagcattcaggtcatctatatgacctctgggagggtcatctttgaccacccaatttgggtaaaccccctccccactttccacagacagtaactctctggcttatcccagtttattttcattacacctatttctacttgaaattctcatttatttgccattgtttctctcctcatactgaaatgtcaacttcattgtctggcataatgttgaatgcctgatacagtaggtactcaatcaatatttgtcgagtaaacaaatgaatgaaagcgtcatcacagtaccttgccctgataatttaaggaagagagaaagagacttgcataaagtctaccctggatagtctcaggacagctgaactgctgcgggtggggagttggaggcttccactgttctgggactagtgaatgggccctggtggtgtatgcagtcctcccaccacacagcaagttctttgccttgtctcagctacctttgaggaagagccgctctcatctggcttctacagatgaaggcactggggctgaggaacattaagtccaggtccaaggccatcagctaaccagtggtaagtgagatctcatacctaggactcaagcttcaaggccagagtcctgactgccgtgctgctgttcaggtgctacccagcaaccctgatgtggagaacatggtgaaagttggaagcccctcttgagactttatttatttcttttcttttctctctcactctctttttttttttttttttttttggagacaaggtctcactctgtcacccagtctggagtccagtagtgcaatcttggctcatcgcagccttgacctcccagtttcaagcaatcctttcacctcggcttcttgagtagctgggattacaggagcacaccaccccgcctatctactgttttgtattttctgtagagatggagtttcgccatgttggccagactggtctcaaactcctgagctcaagtaatccacccaccttgacctcccaaagtgttgagattacaggtgtgagccagtgtgcccagccaagaccttatttatttattttctaatgaatggagtaagtaacagccagtatttatgaagccttttgtatgtgccagttgctgtgctaagtgctttacatccattaatttgcttggatctatgtgggctgaccatctcaggcactgctcaggatggaacatgtaactaaaatacagtcataagagggagtaccttattcaaagatgcaaaactaatctggaaaggtatgcaagggtgtataggagtgtgcagagagagaagaccctatgtagcatgtgcacaccacaagccagagcagttatctgggtgaaaatgaaaaaagaaaactacaaaaggaatttgctgctaggttataggatgcattacaaagacagatcagggttgtgggaggcgctcttcacatacaaattgtaaatttatcacaaaggttgtgtgggactcttactccccaaacatctgctactagtctgttttactaaaagctgaacatctgatagattcttgactggcactgggggtaatttcatgtctcggaaggtagaggaaacagaactgctattcctggattacacattgaccaatatgaataataagttaatgtggattggataggaatattggagaaaatgaccatgctatcctggaattcactttattgagcagagttctgggcattgatacatacacttgacattcagcaaagtgattttaatccaacttagtgcattacaggtaggacccattgacagaggtcaggaagaatggttagcttaggaaaatataacatgaacatgaaaatctgaattgttcccataaagaagaaaagagtgaaggccttgaaacatccttcactaggtagaagccctgctcttattaaactcagatttttaaaagaatacatacaaaccatgagatatgggtatgttgtgtaggataattcagagaacattgaacattggtcccaaaaaagtatgttcacgttctgatctccagtacctgcaaatgtggttttatttgaatatagggtctttgcaggcataattaatttaaggatcttgagatgagatcgtcccaaatttagggtggtgcctaaacccaatgaccagtccttctgagacaaaggagagagagagatttgacacagagacacacagaagggaaggccatttgaagatggaggtggagatggaaataatgaggctacaagccaagaagtatcaaggacggcaggcgagcaccagagattaagagacgggcatggaacacactctcttagaacctccagaaggaagcaaccctgctggcagcttgatttttaactgtttatatcctgaattgtgagggaataaatctctgttgtctttaagccatccagtttgcagtattttgccacagctgctacagaaagctaattcagtaccttaaacctctaaaaagatgagaggtggaggtacaagtcaaggctcagataaatctgaggcctaaagaaccgcaagtaaagcaaaggggtcttttaaacagaatttgaaacagaacacaaacaaggaaaatggtttgcctgctactcagcaggttgctgtcattttcacaagtgaccataagaaaacaaatcagctcagccaccatggagggaacatgaggctgagctctgatccacaccccagcatgacgtttgcctgctccccatgggacagtggaagggccaggggacctgggtatatgtggggcatggacagcatttactgtcccgtgggttacttcatttccactttctgtcagtgatgttgggaaaatcatatttaactgtttttttttaacgtaaatacttagatgaaagctccatctattttttctgttttttcttttcctatcttttaaatgactgtaacaatagacagctatttaagatttccccttctattaaaactgcttgctaagcaagcttgtgaaatcaatacactgtgattatgttacaagccaagataagtgttatttcaaatatttgatcaaatgggtgtgtacaacacagcccccattttaggtagattatatttttttagtgattctgtttccccttgttcaccatgcccttggaaaaatcgaagccccctcttcttgcagaagcataattttagagcaagatatggtgtccaaatgaagtaaatgaaacatcctcagtttgctttgtatttctgaagatgttcacagttcctcagggggcaatcttagatttctaggaccacctggaggtctggacaccaaagaaaccacacttaagaaaaaagaattgtcaaaactgggcaaatcccagttgtcacacttaagaaaaaataattgtctaactgtaaactgtttgactccttaacatgttgagacagtgagctaaggaaatggaatttcgcttctttttgtggaaggtttttatgacgccgacataattgagcccattgttggaggcaagcaccatggatttttcagtgtcattattgtatttgcatctttgtggattaatttaagcgggttttgccgctaggggtgagtcacaataatcgttatcaagcttggacaggaaaaagaaagagatccattttccaggatcgtgaggataaagtcctcctaaaattactttgtggtgaaaggctgattgggtcattttcacacccccaggctatgatagggtttattacagtttacaagagttagagcatttacccttgagatgggattcagaatcccagttacctcagtgatctgaaggaataaggcagggcagaggtgacacaacaagccagtacactgtgtctgcccactggccctggagccattctgtggactctagagctgtgtaggtggatgtcctggggctgccgctggaaaggtgtagacagctgtggaggagaggaggtgcactggggccaatcctgagtgccctcgtaagtggacctgacttatgtgaccatttctagcattatgttgctcattgtttcctctgcaacttgacgactggagtaacctcatccgtcctcacccctcctgtctgtatggtattgatgaatctctggaatgaggatgtcacagtagggttgcgtgacttggcatccagcagggatctctggtgagggtacagggctctaggccaagggaacagccccatcaatggcagtgtgagtgcctttggccattagctgttttctgttgatttgtttaaccttctaaacaggtctctagggtgggtattttttttttcctttccatcttttgtgttaggttcaggaggtacatgtgcaggtttgttatgtgggtaaattgcatgtcacatgtgtacagattattttatcacccaggtaataagcatagtacccaattggtagttttttgatcctcaccctcctcccaccctccaccctcaagtaggccccagtgtgtgttgttcccttctttgtgtccgtgtgtactcagtgtttagctcccacttataagtgagaacataggctgtttagttttctgttcctctgttaattcactcaggataatggcctctggctccatccatgtcactgcaaaggagataatctcattattttttatggccgtgtattattccatggtgtgtgtgtataggttgggtattattatccccattttacaaataaggaaacctcagatcagagaggctttgccccttagtagttggatgcttttaggaaagtacctcatatcctggtgctatagtttccactgctgtagaatggaggagaacaagggatctagcctgccttggaggtctgctgaggggggataggaggtaaagtaagcaccacgcctataccccgggaaggacccagtgaaagtttctcctcctcctcctcttcctcatcattaataactcatgtagtcattctcaaacttttcatcctgacacttgacagctatttctcctctaagaacggaatgttgcttaatgtggcatcattttgaaacagggtcttcagaggttaaaaagaaaaagtgaaccatcacagagcatcctcagtgacccacattgcttcagccagtgtacaggaaatacttgtttattctccttctttgtcttcacccttattttttttccaacttttattttatttttatttttattgttgagactgaggcttgctctgtcacccaggctggagtgcagtggcgcgatctcggctcaacctccgcctcccaggttcaagctattttcctgtctcagcctcccaagtagctgggactacagacgcccgccaccacgcccagctagtttttctatttttagtagagatgggctttcaccatgttggccaggctgtcctcgaactcctgccctcaagtgatctgcccacctcggcctcccaaagtgctgggattacaggtgtgagccatcacgcctggcttcaacttttatttttaacttcaggggtacatgtgcaggtttgttatatagacacacttgtgtcatgggggtttgtcgtacagattatttcatcacttaggtattaagcctagtacatattagttatttttcctaatcccctccgtcctccaaaccttcaccctctgaaaggccccagtgtgtgttgttctcctctatgtgtccatgtgttctcatcatttagctcccacttaataagtgagaacaagcagtatttggttttctgttcctgtattagttttgctaaggataatggcctgcagttccatccatgttcctgcagaggacatggtcttgttcttttttatggctgcatagtatttcatggtgtatatgtgccacattttcttatcattgatggacatttaagttgattccatgtctttactgttgtgagtagtgcagcactgaacatatgcatgggtgtatctttataatagactgatttatactcctttgagtatatgcccagtaatgggattgctgagtctaatggtatttctgtctttaggtctttgaggaatcgctacactgtcttccacaatggttgaactaatttacacccccaccaacagtgtaaaagtgttcctttttctccacaacctcaccagcatctgttactttttgactttttaataacagccattctgactggtatgagacagtatctcattgtggttttgatttgcatttctctaatgatcagtgatgttgagcttttttaaatgtgattgttggctgcatgtatgccttcttttgagaagtgtctgttcatttcctttgtccactttttaataggattgtttttcttgtaaatttgtttaagttccttatagatgctggatattagacttttgtcagatgcataatttgcaaaaattttctcctattctgtaggttgtctgttgactctgttggtggtttcttttgcagaagctctctggtttaattagatcccatttgtcaatttttgcttttgttgcaattgcttttggtgtctttgtcatgaaatatttgcctgtgcctgtgtcctgaatggtattgtctaggttgtattccagggtttttatagttttgggttttacatttatgtctttaaaccatcttgtcttaatttttgtatacagtataaggaagaggtccagttttaatcttctacatatggctagccagttattccagcatcatttattgaatagggaatcctttccccattgcttgtttttgtcaggtttgtcaaagataagatagttgtaggcatgcagtcttatttctttcctctctatttggttccattggtctatgtatctgttctcataccagtaccactgctgttttggttactgtagccctgtagtatagtttgaagtcagatactgtgatgcctctagctttattcattttgattagggttgccttggctattcaggctcttttttagtttcatatgaatttaaaaatagtttttctagttctgtgaagaatctcaacggtaatttattaggattagcattcaatctatgaattgctttgggcagtatgaccattttaacaatattgattcttcttatccatgagcatgggatgtcttacatttgtttgtgtcatctcttattgcttggagcagtggtttgtagttctccttgtagagatctttcacctccctagttagctatatttctaggtactttattctttttgtggcagttgtgaatgggagttcattcatgatttggctttcagcttcactgtcgttagtgtataggaatgctagtgatattttgcacattgatgttgtatcctcagactttgctgaaatcgtttatgagcttaagaagcttttgggctgggactgtggggttttccaggtataggatcatgtcatctgtaaacagggatagtttgacttcctttcttcctatttgaatgccctttatttctttctcttgcctgattgccctggccaggaattccaatattgtgttgaataggaattcacccttatttttttaaatcactgcactgaaggcaaggagttgtctttgggctaccataggtgaggaaaagagatttgctcatgggattccatggcagaagagcaaatgattgcctggtatctggagaacaacctttgtgttatccatctgtattggcctgttcccatgctggtaataaagacatacctgagattggataatttataaaggaaagaggtttaactgactcacagttccacatggctggggaggcctcacagtcatggcagaaggcaaaggaggagcaaaggcacatcttacatggtaacatgcaagagagcatatgtaggggagtgcccctttataaaaagtctcaggtctcgtgagacttattcgctatcataagaacagcacaggaaagacctgccccacccccatgattcaattatctcctaccaggtccctcccacaacacatgggaattatgggagctgcaattcaagatgagatttgggtggggacatagccaaatcataccaccatccatccatccttccctctgttcctctacaagagttttggagcttctgccatgtgctggtcaaagggtacagcagaagaccaagaggcagtctgtgctttcacagagatcacattctgctgaacagaagaagtagagagatttagttatgtaatttcaatttatttatttttttaagaaaagcaaacttctaatcagggacaagagaaatggaatagggctgtgttggtggctgaggtgattacagtgagagaaaatacagttttcctatttttaatgccgagttttggctccgtagggggaaaagcaggaaaataatgctaataaggtctctctctgctttcttaaagaggattatgtgattttctctatgggatatgtgatattgaaaggtacaaataaaaggaagtgtctttcaagtaaggaaccatcagtagaggctcctgggagactaggagggctcaggcaggaggggaatccccagcatctggacaccccaggagctaaacgtttttgtggctataacttccttcatagcctcctgcaagatggagtaccttgtgccagtatctgccaagcagcgtgggatgccaggaattttatttcactttggtttctaatacacccctctctctctctttcttttttacagaccctgcaattgtcaatggggtttattggtctgaatctctaaacaaagtttttgtagataactttgaccgtgacccatctctcatatggcagtactttggaagtgcaaagggcttttttaggcagtatccgggtgagtatacctgcattgacagttatgactcagattaatgataactgataatgtggtatttttctttagggttcaaggttaaaacttttctgccttttcttagaagaaaatgaaagatgaattccaaacctattgtcagggtgcaggacaggaatggcaaggtggcatccagatgggcacgcacacacacaggacatgatcacaggaattctctggacctgccctgttctcaatagaataattcacagagctgtcaccaaatgtgaagaactgtagtgtgaactgtaccttatttaatacttctgaacaagagtttggccttattaccaatactgctgctgttattgctataattattattattggggaaaagagcatacttgggcaattaaattctcactaacaggtataagaaatagagaatttgaaccggatttgtccacccaagagctgactccccttgcaggaagatgttgaaatggcccaggcgtcgctgacggcaagaacccctccacagagggtgctcccagcaccctagcacccccagtactcccagcggtgcgtatctcagaggctgtccatcatgcctttggaacaggtgttccttctggagccttcccaggcctctgctttgtgataggattttaattctggcttggtttgaattttaattaaaaagggaagttttaattttgcttacaagttgtgaaaacaggactcggggctgcaactgtgccaacatcacagctgtagaaattaacaagctcaacctaaaagaagggggagaaaaaccccaccctgcataatcttggagcaattaagtgaagtctttcatgttttcattaagtaagactaggcacctgatgccttcccactttgaggcacagactgccggcctctgccttgcggagctgtttgccccgcgcacagcatctgaccctcgagaattgcctgctgggtctctgctttgccagattacagaacatttcccaagagtcatgttcagcatggcacacgtgcttcctcccggagctcacagaaatgtaaacaataagcatcctattaaagataatgccataataaacagtggacgattaaagttccagtgccaccaaattgcagtctgccttgatacactcaacagagagcaaatctggtgcagatattgctgaaatcagagcctaggggagaggttcctctgcttgggaagcccctgggtagccaaccgtctcgctatgcggcactgtgaagagggcaagacagataagtagaaaccgcagatcacctgttgtctcctccaacagggagtccttaaactatggtcacgaggacatttgaaaataaagggaatcctcataaagggtttgtgtaataggggagattaatttacatacaaggtttttatcagtcagaacaattggttcagccatgcttactgttcttttaggacttttgggcaggatgtggctctgtaaaatgcctgcataatttctgtgttagtaaagacgtgggccgcagtccaccaaggtgtttcaatgccttgataaatgtcatgtggccactcaactctgtgcttggttctgaacacagagcatacctcttgcctcctggacatgtgactcaaagagtgatcatgagcattttgcgaggatgtttttcttttcaggatgcctctttccattgttagagtggtgtgaatcagtggcaagtgtgcgtgttcttaagcagaaggagtctttcttcagtcttactgagttctggctttgtaccactatatgaggccctgaggataaaatcatgaactagacaaaagaggtctctgccctcatccagctccttcttgtggggacatgcatttgtcgtggattttgtttgcaagggacagaaacacaattccagctagctccagcaagaagcacacttactggctcatgtaatttgaaatctagggagtgtgccatttgggcgacagcaatgagagactggagcaaagtcatttggaatttgaatccttcctttcagctctcatttctgccttcttccattctaaccttgtctcactggcaagtgatctcctcgtaatggggaacaggcctggcaggatttctcagtgggggttccaggggaggagacagcatctgtcccagtagcttggatgaaagtccaagaattagcctggtctgagttgcttgcccaccactgatgcctgaagaactagtgggtaaggtcagccatccgaaaccctgggaactagtcaggattattgtggctttgcctagactgcatccccaaaggagggggcatcagtgaccaccatggggagatagacaggcaaacatcatcatggtacagtgcgtttcatgctaagctgagggaaatagaaggtgctgggtgatcactgagaaggatcaccaactccaactcctggcgtgagaggaaagagtcctgggaaggagaattttggtaagcattagcctgaaagccttggcgtgatgatgatgtccatttctgcatggcttcacacataggccttcaccagttcaatttatgtcctaagggcatgtggtaactctcttgtgtctctcaaaaggactttatgagatggtggaaatgttctgtatcctatctaatatcactaatgtcactggccacacaggggtagtgagcacttgaagtgtgctaggtgaggctgaggaactgaaatttaaatgttatttaactttatttaaaattaaaattaaatggccacacgtggttagtagtcaccatgttgaataacataatgctgtaggaagagacttctgtagtctgataccccgtttccaagggaccagccttatctttcagggcttgcattgcaaaaaggtcttactgaacagatgacttcattaggctctatagttcttactttataaaatgggaactctaccctgaaatcctgaaccatcaggctttcaactcctgtctcctctactataatatttgcccctgggaggagtcatttgttttgtccattactctgtcactagctgcaagaataacacatagtgggtgctcaatatgtgtttgttgaatgaatgaatcacccattagatcaaactccaccagatctgttgtctcccatcacaccagtggcagctgccctctctcttcagacagaatagagctattgcctctttgggggagctggtccccagctgcactctggtagagacttgatgactcagcaaggagctggcataaatgcagtacagagccatagtccctttatgttctcattgatccctctcctccaagtcttcctagtacctgccctttccaccccactgcccaccatgtcctggacactgggcatgcccatctgttggctatttccttctgatgctttatgaccatctcatctaatgagtagtgttctccaggctccccatctcccaggaggcagaggatcaaagggctgcacagtcatcccttttcctgtgaggcttgaccagttcatctttttatagccctctgtgggacccgttttctacctggttattggctgaggccaccagtgactgatctattcttcctgttctggccaattcttagctttatttaaaatgatgtggctggctgacagtacctacccatgtactcttacctacataaagaaaactgtgtctatacatcacagacaggtcactgtctaatcaaacacaggacatcagttaggttcatgcatgattataagaagccctggtcccttccccaacatcagactgtcacctttctatagccgtacgcaggggagtttgttcctgtagaaggcttggtaattacaaaggtcaatgattgtcttatccttgcactatgatttggctgccataggaaggtgaaagctggttcatagctacagccacgatgagggagctgaacagctaagtaaagagttctccataagtttggactcatacatgctgtttgctagtatcaagttcaggttctgtgcacagcattactttttgtttcttcccttccatgccttcctcaccaggctcaggtttagcaatggggagagtatgattgatattagggttttcttccttggctagctcaacaggactgccctaataaagatgatcatggaacaccataatttataattttcatagcaactgtcttgctatatcctcatattcatggtgcgtaatctctcaggagattggcaagagagatggcatctagttgaataaaggagctctttttagagaagtgcataggcagcttctcagaagacattttacagccaagtttgactgtagcttgactcacattagaagccagcatgtatttttgatcagatattttagatctaaagttatctggaaggtatgtgtttaaactttaaattatgggccaagtactaaatattttttgaggaaggaattgggcagaacttagggataaaccaatgtctgccaccccttgattttccttctttccacatctttctggactttttgctttcaagtagggaagacaaatgccatgtttcagtaggataggcagtatctgttcaggtggaggtggttttttgtttgttgtttgttgttgttgttgttctctgtttgttttttgagaaggagtcttactctgtctcccaggctggagtgcagtggtgcaatcttggctcactgcaacctctgctgcccaagttcaagcaattctcctgcctcaacctgccaagtagctgggattacaggcgcctgccaccacacctggctaattgttgcagttttagtagagatggggcttcaccattttggccaggctggtctttaactcttcacctcatgatccaccttggcctcccaaagtgttgggattacaggcgtgagccactgtgcctggctggagatggtttgaatgtcattggcagtgccagtgatgttgtatggaaaacactgcgctttaaagacaggagaaggaatggacgaagatgccctttcctgaagtggagagaaaaggagaacatggagcagaaataaaaccacagggcaaaaagatattcagatttttattgtgctatttgttgtagtccttcatagttccattacacagtctcagacctcattgccacacagaattatgttgggaacatgtggcttgaccttcagtcttgtatcagtctctgttcctttggccctactgtttcttttcacaagctaaaagagaacaggaagtcataggttgtcttaaatgaaattaattttcctccaatgttagtttgtaatgcctgtgggagagaacccgtgggatatagcagtgttgcacaatgattcaaattcactcaaatttgagcgtttgaatctgcagcagagatttggacattattttcagttttacatagggatttacgtacattctggggacaggggtggccgtggtcttaagatcactcaccacagttcaattcaagaaacatccactgaacacctcccgtgggtcaacacatttaaaaaacaaaaaataaaaaattatctttatatcacactcaaaccagttatttgtggaattataaattggagcattgcctagcctcaccagggatataacttcactgtttctcaagactgtgccatcctaatggtacctggctttatgcaaagcaatgtgtcagatatttttaaattaattgcattcttgtcccttagtgtgcaacatcatattagttgtattttatctttattacctaatgacctccaatttggcagtagcttcttatactaacattttctgatttcttatggagagtgtttttaaattagacacatgtgcagtgggaaatgtaggtacaagaaggacagaacccaatatctctttgcattacagactactgtctcaaggttatctgtgtgataatttggggatgttatcttcagcagatgcctgttattagcccattgtggtcctgtagaaagctggccattgttaatcggaaaaaaagaatctcaatgccatcagctgagtcaggattctctcctgcgaaaacgatatttctgtttttattttcttatctccaaagtctctgttgcaaatcctccatccctgagcagaactgatggttgaaaacagtgattttctgtcttatttttaagcagccaatgcctttcttttcaaatgatattttattcttaaaaactaagttggatatatcctgactaggctgcaaaccacaagactaaggatgttggatctgattttacacatggggaaaactccccaggcttcaggagctgaaattcaaactttattatgcagcataatgagagccattttatttcatttcaatgtggaaagccaggccaaaatttctgattttaaaaacaggagtgaggagggaacagacccgtgtatatccttagttggaaacattgtatctatgctttcaacccccctcctgtagacattacatcacctggtccagggacgggccagactctgcccagagatctatggatgatccccccaggtgcaacaacttgctggacagtaagaaatgacttcggctacctttatccctagccaagggaaggagctggagtcacatactctctcaatggacagcacagtcctaaaaacatctccactctctgcaggcctttggagaagctgagctagcgctgtgtttgctatagggttatggcccaacagctccttcctggatttggcgatggagcatgtgatgagctctggggttggtctttgcatgtgatttttcaccctgtccattcaatcagcaaagtagagcagccttgaaatgctatgaataaatatttgaagtttctgggtttctcataaccccatttttcttctagggattaaatgggaaccagatgagaatggagtcattgccttcgactgcaggaaccgaaaatggtaggcagtggtcagacctctttgttatttctcaaagagatatcttgaagagaagtgaagtcaggattaattttgacttaatttttcccttgacctaggtacatccaggcagcaacttctccgaaagacgtggtcattttagttgacgtcagtggcagcatgaaaggactccgtctgactatcgcgaagcaaacagtctcatccattttggatacacttggggatgatgacttcttcaacataattgctgtgagtgcaccgttttgtgccttctttgcacttgggttcatttgatcttttggtagtgactggttaacattgctctcgctgttagatccagagcatctagatgccagaacatgaggcctggttagtctcatgaaagttgacagagtcatggacagtggaaggcagtggaagggcttttggaaatgcagttgaacacacgttgcctgtcttaacctaccacacagccacaccgccacaccatctgagagaatgacacaccagatgtggtattcctggggagctgacattttcagattcttggaaaacagacttagcaagattttcaccaaaccactagaatttctcacatggaaattaacttccagctaggttagcctgatgatattgacgatgataataattgataataataataataatggcaatgaagcaactaaaatatggagagcactttatggctcacagaacactttatttcagcttctggaaaaaaggtggcatttattaaatgcctgcttttaataaatgccttaatcttcatatttttattatcttggtttttcacagcaagtctaggaggtagggggtggtttgggcatattctcaaatgaaggtgctgagattggaagagtgtcagtaacttgtccaggtcacaaggctggcaaatgggagatcagggaaccaagcctgagaccgggcagtcatgtagcctggaaatgaccacttattcaggtgtccatcttgtcaatgaaaagaggcaaactctgcaaaatatttgaagagatttattctgagccaaatatgagtgaccatggcctgtgacacagccctcaggaggtcctaagaacatgcgcccaaggtagttgggcacctgttcagcttggttcactggtgcagcttgtttttctacattttagggagacatgagacttcagtcaaatacatttaagaaatacattggtttggtccggaaaggcaggacagctcgaagcaggggcttccagcttataggtagattttaaaattttctggttgacaattggttgagtttttctaaagagctgggggtgaataaaaaggaatgtctgggttaagataaaggatggtggaggcccgagttcttatttgtagaggaagccttcacgtcctaggcttcagagagaataggttgtaaaatatttcttatcagacttaaagtctgtgttgatgttcatgccggagaggtgtaaggaggcatgttcgacccccatttcccatcacggcctgaaacagtctctcagattaaattttaaaagagcctttgtctcctgtgtagaggaggaagtccattcagatggttggggggggtcttagaattttatttttggtttacaatctccagttctttttcttcttcccactgattatttggtatgattttcatcatgccccttatgttcctcccactctcttaccaaaggctcgtcagagtgagcctgatttctttgagtccttgagcacttaaccaagtgtgtgtgtgtgtgtgtgtgtgtgtgtgtgtgtgtgtgtgtgtgtggtggacacttattcttttgcatgaaaataacacacatcacatctatttgggaggtggagtagttgctatggacaatggaggcagcatggtgatgggcgcagagcctgggttttggagttgggctgttttgaatcccattcaccacatatgctgtgtgtcttgggctaattactttagtctgggcatcagctacctcagctgtgaagtaggtgtgctcaccttgcccacagggttgctgctgggatcatctgagttgatgcaccagagtcaagctggtgcacagggctccttagccagtggtgggatacaaaagaagagggtgctccgagaatgctgttgctgtggtctgcatggctcccctaaacccgcaaggagagtatgttgtcatggatggagccttatgactgggctgccttctgcataggcgtgacacccacttgtgttctccaggcagagggcctgggcctctaagtgacatggtggccgaggggattgcctgaattagtatcctgcctatacaggcctcttctgatcagactctcagaacaaaagtttctgattttaagaaatcctaaagacgaaagggaaaagaaagagaatactaaattccttgggagcaggggttagtcttgttcattcatggatgtatccccagcacctaggcagtgcttggcaaatagcaggagtttaaatatttgttgaatgaataataaccacagctgccttccactcactgtgtgcaagtcagttgctaagtgtcctgtgtggattatctcactgaatcctcaccccagctctgtgctatgtggcatggagacagaggcatgaagccgcagaagtgactttttgagttacacagccagaaaaggtggcacggtgaaggctcagacattgtccggcttcaccttgcaccctttcctgagcagaagtgaagaggatatagttgatccactcagccatcttatcatgaaattatatggccttgaggcatagttctttggaagaagactttcagatagttagaactttgggtttgctgccaagttactctagttgccagcctagtggtgagaatgcaagtgtggcttgatccccacacatcctgaagcatttatagataagaagcagctaatatgagactatctttcttattaatctttaattactcattacagaagtatcagaaattcacgtaataagaagagctaactaattacatcctgcattctttatcagtcaggatttattgttctgttaacaaaaccaatcgattgaaataatctatgtaagttcattaagatatacaaacagtgtcaactcaataaagaagagagggtgactaagataattaaaagtaggcatgccagttattatagaagagttaagaaaaaaaatttttttaccccaaattgtccctttatataaagaaacccattaaagatcccattaaccctcactgtgcatctgtttgttcattttcaacataaataatcagcttcaacactatttacataattatttcaacaactagaaagacactctgaacttctttatttgaagcctttatagtaaaatcatgaactttgttcctctaatggataagagaatggatcagatatgttagtgaatttatattagaaggccaaggtcataaaagaaccattaattaatagtaatgtttataggttcattgctttttaatgtaggcaatgtatgtaataattttaagcaattcagtaatgttctcatttctctttcatttggcacatattctaaatgtttctgtgtatatgagcacacagtcttttcgcaaaaatggattcatattttacagaatattcagcaactcttatttcaatcaaatgtatttgaataacagagcattccatcacatttgttactcagaagtgctgcagtgagtgcagtgcgtacagtgcactgaatggaatgcatatatttttgcaaggttgggtgtgcttctattgaataaaatctagaagtgaaatttatgcaccaaagggtatacacacaggcacctaccagaatgtctaccaaacagggcataatgtttacacagttaccaacagtttgaggcttctaaataataggagattcctagctggctaattttcatttgcattcccttgaattgtctctcccaatcctaagtgtgttctgcgaattttgcctcgttgaattcttattcttttttcctccatcacctccttctgtttctgccctgacataattgctctagtaatatggtgtaggttttccctcagtctgtttaaaatggtcacttgtctcctgtgtagagggcgacccaactgcaggttcttaaagtgcaggggaatgggatatttgaaacgccatccagaacgccctgcaaatctgtgtgagtgcattgttatcatcggctggattccatttacgaaagaggacattatcatttcaccctccattacactgtcagccttcctttgcttgccgggtagatgtttgtggagatagctcactgttttagaggaaaagtaaagaatacaatattttcagtgccggaagccctcgtgtactgtaggtttttgtttgtgcaaatctaattcatcattgcctcttgattttcagtgccataatggaggtcggaggaaagagatttaaatagtgggaaagacttcccttggccacttaagttcgtctttcggttttgcaggttttattaagttcattgtgaactgcatgtttaatattatactgaaaagtttctgatcttgatctatccagagtataaacataaagagataatgttaaaaattgttttagctctcatgggcaaggtattacaagatctatctaaaatggacaaactaactgattgaattatgaaagaatagttgaaatatgagagtaattttgtgcagttgaagttaaaattttaaggtcaaaccactggtgcatgaagagagatgtctctgacaagagaaaaggcatatttttctgattcactttgaagtctaacttcaagccatgcattaaattaacaatattatcataaaaatgagggtgctaattctgtccgatgttgaaatttgaaaaatgactttacagaagcttaagccatgcattaaatgaacacagcattaaccgggccaatattgttacatcaatttaaatgcctcctgcagcccatatttgtgcagacttgaattaagaagagcatcatttgttagttcaagcaagaactttctgatgccctggttttaatttgcagattttctttagaacggtttctccgatgctttgccgctgtggatttgctttttaaagtaatcgattccgtattaaaagtatgaggatagtattttctttcagtgctcatttgttctgtactactaattgtgtccagttgtgtttcaaattacataagatgcttttgtaatgcaaaagatccctaggatggcttgtgttggtcaaaataatgtgtgttcatctgctttattacataatccctacatgttttcattcaaaggttatttaatcaaaagtgcaccagtaaaactgtaaaaatatttaatggagtcccagcaattctgcatcagtttcttgtattacatgagcatggcagcatttaattctatgggtttttttggcagaactttggattctttaaaacatagccacttacttcctttactttttgtttatttacctgttttttgaagggggtagagattcttatcttattttttgtttctgtgccaattttttttctggctttgttcctagtcctttccatcagtgatcttctctgcaattttgcctttttgtttctttgttctatcgattcattcaacaaatagtactgagtgctctgcattaagcattggggctaacttaagacaagctgtctgctctcagagacttaggttttctgtgtgtgagccttgtttgggggctaccaggaagcaggtctcacaacacagtgtggccagtgcagtcttggagagggagtagttggggggctgggtgtctagagctgggtcatgtatcgcctggggctctgtggtggcttatcagaagaagtcatgactaagtggacacttgaagataagtaggctagccaggcataggcaaacgtgatgggacaaggcagggagagaaggaggaaggagtcaacaactgaggaggaaagtgccatttgcaggtgtaagatccccctaccccagcccctaagaaggagctcttggtgtgtctggatcacataggggggtgggtgaatgtggaggcaagtggatccggtgagtgatggtgaaatgaatgagactggatggagagaggcaagccagatcgaaccagtctggtcagccaggtggaggaattgggacaacccatggaggcaatggagacccacagaaatgagtctcagcttcagggcagggtgttgagatgcgccccgaagccggtccctgcttagagaggtctttcctcatcctcttctctaggtgactgataaccttctgttaggcctgaaagcggaattgctttcatctctcaagttcagcttctgacattaggtgggttcctcactgttatccagagcccaaagtcagttgtctttggctctctggcttttggactgtgattcacctgagcctgtgtatgctgggattctacactaatgcagaagctcctgtgaaccttggtgggagggtctagcccatttgcattgcttttagatccttccccaaaacgttctggcccttcatttaatcaaagttgtctttcctatcttagatcatcattaagattctcattgatcactttgctgtgtctgtaaaaggggagatctagggaatgctcacagacattgggcaaaaggaaagaaaaggcatatgatgatgtgtcccttgccttcagggcggagagtttggaggttggttgaatggagacagagggacagttacctcagcaagagttgtgcgatgtagtctaatacctgaggaagattgtgggtttgtctcaagcttgttgttatttttggagggactgttgcagcatcacaaataagcactatttgttataaaaaggaaagccagggccaggtgcagtggctcatgcctataatcctagtacttgggaggctgaggcaggaggattgctcgagcccaggagttcgagaccagcctgggcaacatagggagaccttgttgctacaaataataataaaaaaattagctggacgtggtggcatgtgcctgtggtccgaactatttgggaagctgagtcagaaggactgcttgaccctgggaggtggaggctgcagtgagctgtgatcacaccactgcactccagcctgggtgatacgtgagtgggacccgcgtttcaaaaacaaacaaacaaaaacaaacaaaaggaaaaaaggccttatgttcagatggaacaagagtaaacatactcttttactaagaaaagtaaaaaacggttcattgtcactctacaatgatggtcataagcaaacttagccagtgttttatgtccccagcacacagtaggtgcttagggtaatattcagtgagcaaataaagaagtgaagagttctgtggcagatgccttcctgcgtggggatttcccagtaagctggctgcaccgtcttggctccctatctgccaaagaccccggtccctgggaggattcagagggtggcttagagtgggacagtgtgtggccagacatcatgggcttgtcttgggtacatagatagtgacatgtgcctgatgacatggcatcttatccccaacaaatgcagatccatgatctccagagaaggccaaggacacatgcccctgttccaaagagtgagtcactttgccgtcactgacatcaccctcttccttcatagcaagttccagctctgggtgcagggtgtcatctgttggcctttccctttatgtagcacacatcacactcacatatatattttctttcttttttgtgcatttgtgcctgtgcacctagatgcctttctcattcttacgtgccaggttctatgttgacttatttcatcctcacagtgagctcatgaaagaggtgcagttagaatacctgtttccccaacacaaaagctgaggccaagctcacccagctagtgtgtggcagagtcaggatttgaacccgggcctgcctgcctcagttgctttagctctactgttctacccttgtgagaatcagaaaaggaaagccaaccaggaaggaagcagagagaagaaagccaacagcatccgagtccccgtatgctatgtggcagcttctaagctctttaaagggtgaaagctgtttgtccatttccttaccgtgtagttggtgggctggactggacccatttccagggcagcctgggcccactcctgtcttcctaagagactcttcccatttcccagaaatttgcaagaaggactaaccacttgggcagaaaggggaaagtttaagtacgtctttagggttcaatcctggtagtgcagggaagtaaaagcaaattatagaaggaaattgcatctagctggtgatgatgtacattgtatccttttcttccttagactgttgatatcagattatttcactagggatcaaggagagccatttataaggctgttgtgtcttagggcaagaggtgaccaaatcttgagttgtaaatatatatggctcttctacaacatcgtttcacaaaatagaaatctagagaacatacacaaaaatgcagaagctgaaagatttccaaataaagggctgcgaggagtctggaagcagttccgtgcacagggcatccttggggtccccctcgggaggagccgttgggtagtgagaggagcgtgcatagctagcaggccttagtacagctgcctggtgtgcacagttcccttacacacatggctgagcccggctccctctggtgatacagaccagattgctcagcatagctttatcctgatgcagtcaagggaaattagtcaactgcaagcttggatgatgccactaacaagctggctgggattctgaagagcggattcttccactgaggccatagcacacacagtgctggcaagcatggttttgattactgcacatgtacctccctgatgagggcaagaactccttggtcttcttgacttttaaatcccctctggagcccccacaagtatagacttttatattagcaaggcagtttcaggtctgttgcctcactcaatttctgcagggcccccagagggagactgaaggtgaattagtgtattcttatgcataagattctgggatcagagaggcttagcaacttctccaaggccacacagtgagtacacggtagaggcaggacttggacccaagtgacctgactcccagctcaaactgtacaaccccaggaatcaattttgagagtgtgtattaggtagaatgtcaatgaagtgattcaatttacctggaaaatggaagaatgagaggaagtaaaaccacggtgggaacctcagttaagaaagttttgggctctggtttatagaacaggtgaggaaaggttggttcagcatacaggcatctgataatgtcatgtaagaagcctggaggaaggtggctgcagcttttgcacagtagctcaacattatcttcaggggcccacactggctccgtcttcctgctgtgtcttccttgggctttgcattccgttctttctcttgtaacctcatagttgcaaaatggctgcagcaactccacaatagcatcccaagcaggaagaaaagagtgagtatagatgagttttcccttaatggcaggaaaacgtttcattgaaactgcccatcaaactttcccttatgtcatggtcatttgactgcccctagctgcagggcagcctatgaaaggtcgtgtccaacaacggggaactggatggctgtgactggctaagaccctttgtgcttcaggccttagaaatcggtgtattgtcaccctaaaccaaatgagtcagcaagggaagtgaaggagaggggactggctgttttctcagcaacttccagggtcagtccaacagagattgagagctttggaggagttttccttcatattgaactctgcagttgcttcttggatcctgagctgatgttctgtttgttgactaaaagtcatactcccatttgtcagtggctaatgtcataaatatattttttctccatgccttgttagaagatatttaagccctcaaatcattgggatataatttttcaaatactttttatatgactaaaagcaaagatgaacgagagggcacaagcctgactgatggggagatctggaggtttgggggccagagaggataagttgggggcattgaggacctgttgtgagtggcagtgaggtcagactgcctgaatttgaatctggactccaccacccctcacttactctctggtgtctttgggcaagtcgatcatttttgccgtgcctcagtttccccatctgtaaagggtgagtgattggacgtgcttgccaaacggtgctaagataacgtgcagatgaagtttccctgctgcctaggtgcagtaagtgctcaataacagttaattgccaaggtcagtttgatcaccacttctgcttgcttagtgaggctctctccatgggaaacctgatgcatcccagttgctcttgagcagctttaggtctagcccctcttcgacctgtccctgcggtgtatccagagggatttcccaaactcgtatctttattccactcactcccttgctcacagccctgcctggtcctcgctgactttagttttaaagcacaaactcccgaggccctctttgctcaagagttagctgggtctgggagagatggttctgttctcttccctcaggagctccgggcctctttggctgctaaagtagatataccataacgctgtcatcaatcaaatggtcctcaggcacctactgtgggtccagccctgtgcttgctgcagaaaataacaccgaaggaccaggcatgggccctaatggtgtggtcccactttgtggtggggaatccggccaacagataattagaatttacagggattatatggaagagggacctaacccagtgcctagcctgcaccagagcctgcttcccagaggaggtgggagtaatctgacccaggaggtgaacaggagtcagccagagagaagaggtgccagagcgagagctcaaagcaggggtcccagcattggagggactgaaggaaaagaggagacatgtcagaggacagcaggggaataatggctggccaggataagttttaggggaaggctgatgagtaaagatgctagagtgtcagcaggaccaagggtccagagcctcacaaagtcccgggaacattcatctgcacagcaatgggagctgtgaataggattgacaagaggcaacacgatcagatgtgtaaggaccggcctccctgcagggcagagaagcaagcttgctgagagaaatgatgagaatactcacatttttgctacctggttgtgagcttcgggcaaataaaaagtgtgggggggtcctattctggatattctgggattgaagtgatgggagtgccggtgttggcaatgtatgggaaattgtgcatggacagtttcctgatcagcacccacatacccttgcagagtgaccagggaacatcaaggcttattctgtccccacttgtgtaagccacacatgtgtcccttggttccatgaagccaaagacagtagctggagctgtatccacgcaactctggggtgctcttcagctcccaccaggaccatgggctgtcagccatgcccagggaactgccagcgtttggaggcaaccccaaagaatgatcagttaacagggtgcaccctgaaccctgccagctaccagcacatgctctagaagtttctccttcaaacaagaaaagaatgaagtctgtctgcagcacataatcatagttgtctagagggacacccatgagagagttcaccttatgtgaataaatggagcctgtgattgtgccgcttttttgtttgtgtgcgtacctccttaaattattaagaagtacccttcaattccttaattaagtgttccttcttgacttttttcctttgcagtataatgaggagcttcactatgtggaaccttgcctgaatggaactttggtgcaagccgacaggacaaacaaagaggtaggggcagctcgggggagcattccagtcatggtacacccctgtctccctcatagtgattgtttcacaataaatctgtcttatcaaatgcactgccctttcattgaggcccttggagcccccatgtgtagaatatttattaagagcacaaagaaaatcatggcactaaaataattacattgaattcaaaggcttgctagttctgaaacaattgcattcacttattgtccttgtgctctaataaacacaatgctatggtgtgcttgatgcttacgttgacactcttgaaagaatatggctcttgctaagatttcaaagaaaattgaacccacttgttatttcccttgtccttctcacgattgattaaatggtcactggggtaactgttggggtaacttgtctgctattaaaggtaagcttttcaaggataggaatgctgtctgctcactactgtatcctcaatgtgccaagcattgcctgttccattaatattgtggaacaaaaggacgatacgttaaaggagaatcttacacaatgggatagaggtttcccctccagttttggagtatcctaggaaaatttctaaagtagacttctgtaaaataaatcctgtttccctttagccacctttaaatttgtcagtacagctaccgcaaccaccactataccacccctgcagggccagttgacagtttcacttgaaggtatagctgtggctgcagccatgtcacagcttctgggactcacagctgccattgcccatgttgattttctgtacctgacacacagagctgctcttcccctggagagcagacctgcatgaggtagctgggggcaatggccaaggcaggcttttgtgaggcacattctatatgctggagagaatcccctggctcgtattgtgttggtgctatcttagatgcaggtagtagaagcacttaatttaggtatgtttgaggaagtgagcaacagaggattgggagaaattcattccagttggaacacaaagtataaagtgaaaaatacactagagttaatatctgggcttcagtttgaggggaaagaagcagcatgataagcttcatatttaggagggaggaaccaagtacactgaagttcaaagaacaggtgtaacctgagaatgctcattcatggtaattgtttaggctaaggtaagaaaagtgacttaagtctatagccgcatttttctagagactttcccgttgtttggccattgtgtaagtgaagatctcatccctattccaatattgtaatattgtaatatcctccagagcctcaaataggtgttccatcctggtgcttgcaacgttaaacagaacaagcacttaaatgatcaaagccttccttcagattgcttcccagaggaacaaaggacagtatgatctttggaaataggaagttttatgaatgaaaaaaagtcattagaggaaatgggctaagaaattattctaaattgcctttgagtttatggatattgaagactggaatacttttgaatataaaaactaatctggacttcttattctgccaatatggagtaaccatattccaatgaggtcctcacctttataactgagaagccctagacataacgcaacaaacaagtataggttgagtattccttatctaaaatggttgggactagaagtgtttctgatttttcagattttggaatatttgcattatacttacgggttgagcatccctaatctgaaaatctgaaatccgcaatgctccaatgagcatttcctttgggtatgactgttgagcattatatcggttctcaaaaagtttcagattttggagaatttcatattttggatcttggatttttggattagtatgcctaatctgtataagaagacttgaaaaggagaaaatgaaatgtctaggggctttgggtcttaaagacaaaagggaagttccctgattttcctctttgactcccatatatcctgaatagagcattccagaatctcacctggaccaacaataggcacagattaaaaaaaaaaaaagaaagtcccagaaaatcttgttccttctagccaaaggaccacagaaaacctttgtgacaacactttttctactccagctgaatatcaacggaacaaccaatcctacatggtttcagtggggccaaataagaagttgatcttttgccccatgcatacccccttggcccttctcctaccgagaatgactgctaagagaaaagatgaaatcggatccagagtctcataatataaaatccataatgcccagaatgcaattaaaatgccacgaactgggaaaatcacaacatgaatgagaaaaaacaatcaacagaagccagtatttacatgaattggatgttggaattacaaaattgttttaacaagcaattaggaattctcttgcaacaaatgaaacagtagaaaatctcccaaaggaatagaagttataaaatagagccaaatggaaattattgaactgaaaaatacaaccactaaataaaagctcactgatgagctcaatagagtgaagatgacagcagataaaatcagtgaatttcaggacagatcaatagcaattacccaatttgaacaacagcgagaaaatagactggaccaaaatgaacagtctcagggacttgagggacaataacaaaaaaatataacattaattacatcaaagtcataggagaggagagagagaatgggactgaagaggtatttaaagatgtattgtctggaaactcccccaaactgggtaaaaggtgtaagcatacatattcaaaaggttatgcaaactccaaatagaataaacctatgtaaatccatgccaagacacatcataaatataattagacaagaaaaaaatctagaaacagccagagagaaaggacacattgcttatatggaacagcaatttgaattacatagatttctcatatgaaatcatgaagaccagaagtaagtagcatagcatttttcaaatactgaaagaaaagaactgccaacccaggattctatatccagtgaaaatatccatcaggaatgaaggagaaataaaggcattctcaatggaaggaaaactgtaaaactgttgcctctaaacctacccttaaataatgtctaaagggaattctctaaacagaaaggaaataaggaaagaaagcttggaaattcagaaaggagagaagaacattggaatgagtaagaagattacaattagagtatcctaattctcagacaattcttaaattatgtttgatagttgaagcaaaactggcctaacaccatctgatgtgatacccaatgtttatggatggaatacttaagacaattatattttaaaagtgtgaagggtaaagggacctaaatagaaggtttctatacttcagtggaaatggtaaatactgatatgagtagacagtaataaattacatatttgtaccataatacctacagcaaccactaagaaaacaatacagagagttattcttaaaaagtaactcataggaaggtaagaaatgagaaacagaggaattagaaagaggatgaataggaaaaaaataaactggcagactcaagttttaatatatcattaatcaccttatgtattagtctgctctctgctaataaagacatacctgagactgggtaatttataaagaaaaagaggtttaatggacccaagttccacgtagctggggaggcctcacaatcatggcagaaggcaaggaaagagcaaaggcacatcttacatggcagcaggcaagagagcatgtgcagaggaactgccctttataaaatcatcagatctcatgaaatttgctcagtatcatgagaacagcataggaaaaacccaccttcatgattcagttacctcccactgggtccctccaatgacacatggggattatgggagctcaaattcaagatgagatttgggtgggacacagccaaaatatatcacctgaaatttaagtgttcttaagaccatcagtgtcaaggcagagattgtttgagtggattaaaaaaacacaaacaaacatgatccaaccgtatgaccatatgctgactataagaaactcatttgaggcctggcacagtggttcatgcctgtaatcctagcactttgggaggccgaggcaggcagatcatggggtcaggaaatcgagaccatcctggctaacatgttgaaatcccgtctctactaaaagtacaaaaaattagctgggcgtggtggcacatgcctgtagtcccagctacttgggaggctgaggcaggagaatcacttgaacccgggaggtggaggttgcagtgagccgagattgcaccactgcactccagcctgggcaatagagcgagatccatctcaaaaaaaaaaaaaaaaaagaaactcatttgaaatacagtgacagatatgttgaaagtaaaaaaatcagaaaaatatgtaccatgctaacattaattttaaagtaagagtgattctattaataccatataaagtcttcagggcaaagaaaattactagagacaaagaaagggatatttcataatgataaaaggatcacttgcatagaaaaacattacaatcctaagtgtgtttggatcaaaatacacagtttcaaaatacacaaagcagaaactgttagagctgaggatagaaatagacagatttacaattatagttgggacttgtacattccacagtcaccagttgataggctactgtacaaaaagtcagcaaggatatagaagagctgaacaacaccatcaaccaatgagattgaaatgacatttatagagcactctatctaaataacagcagaatacacgttcttctcaagcacctatggaacattaagcaagataaaacatcctgggtcatagtagaaaccttaaaattaaatctttaaaattgtagaatataatttttgatgaaaatggaatagaacaggaaattcataacagaaagacagcagaaaaatccccagacacttagaaattaaacagtatactattaaaaaaatacttgggtcaaagaggaagtcttaaaagaaattaaaaaaaatacaaatctgaatgaaaacaaagattacatatcacaagaggtggaacaaagctatagcaatgttaggggagaaatttatagcactatatacttacatatttaagttctctaataattgaagtttccacctcaagaaattagaaaaaatagtgcaaaataaaactaaagcaagcagaagggagaaaataataaagagccaaactcaactaaattgaaataggaaaacagtagagaaaaatcaatgacaccaaaagctggttctttaaatcagtaaaactgataaacctctaccaagactgataaaaatgaagagaggggcaggcgcggtggctcaagcatgtaatcccagcactttgggaggccgaggcagatggatcacctgaggtcaggagttggagaccatcctggccaacattgtgaaaccctgtctctactaaaaatgcagaaattaactgggtgtggtggcatgtgcctatagtcccagctactcggtaggttgaggcaggagaatcacttgaacccgggaggcagagattgcagtaagctgagatggtgccactgcactccagcctggcgacagagcaagactctgtctcaaaaaaacaagttaaaaaaatttaaaaaaataaaaagagagaagacaaatcagcaatatcaggaatgaaacaagagacgccagtactgaacctgcagtcattaaaaggataataaaatactattgtaaacaactttacactcatgaattaacgacttagaaaaaaattgatcaaattctcaaagccgcaaacttccaaaattcaaccaagatgaaatagatagctagactaatcctataactattaaaggaattgagttgataatttaaaagcaccctctccctgccaaaaaaaccattttcaggtctggagaatgctttcactggagaattctaccaaacatttaaagaagaattaatatcaattttacacaatctcttccagaaaaatagaagagtaaggaaatcaccccagctcattttataaggctagcgtttccctgacaaaccaaagacagtgcagaaaaagaacaatatttctcatgaacttacatgcaagaatcctcaacaaaatttcagcacatcaaacccaatgatgtatataaaaaataatatgctacctgcaagcaggattattgagatatgcaaagccaatgtaacatccatgtcaaatcaatcaatgtaatctactatatcaacaagctgaaaatgacaactcatatgatcatattaattgactcagaaaaggcatttgataaaaaacaccctttataattttaaaaatacaaaacttctcagtgcattgggaatgggaagtaacttctccaaattgatagagaccatctacagaaacctacaggtaacatcaaacttaacagggaaagtttgaaagcttttcctcttaagatcaggaacaggtaaggatgtccacactgacatttgacaaagtgttaagttttagtcaggccaggaaaagaagtaaaaggcatacgggttacaaaggaagaagtaaaacttcctattttcagataacatgattgtgtacatagaaaatctcaaagaatctacacacaaaaaaatttcctagaactaataagagagctcagtaaggtcacatatacaagatcaacacaaaaaccatcctatttctctaccttaataaaaacaatgaacctatggtaactgaaatttaaaacataatacaatttataattgttccaaagaaataagcctaacaaaacatgtgtatataggctgtatttgctgaaaattacaaaatgctgatgaaggaaatcaaagaagacctaaataattggagagacttaccatgttcatggatgagaagtctccacagggtaaaggtgttattttttttcaaactgatatgtaggtttaatatttatatatttaatagttatatatttaatattaatatgtaggtttaatttaatatgtatgtataataataccaaactgtgtttaggtttgatacaattcctatagaaatatctgcaagatttgtgtagagtattctagagtttacctaggaagtcacagtccctagaatagtaagatgatcttaaagaagaatgaagtagaaggaatcaatctacccaatgttaaggcctattatatagtaacagtacacaagagaatgtggcattagaagagaaatagacatatagattaatggaatagaatagagaacacaagacatatacccacatacatacacccaactgattttagacaaaggtgcagaaacaattcgatggaggaaggatatcttttcaacaaatggctctggagcaattgatcattcacagacaaaaacaaacaaaaaacaacaaattaaccttgactcaaacctcacaactgaaacaacatttaactcaaacggatcaaagacttaaaactatacaaccatgacattttctgaaaaaaaaaatagatgtggggagaaaatcttcaagatgtagggctaggcaaagcgttcttaggctttacatcaaaaatataatttgtaaaaggaaaatttgttaaaatggatctcattaaaatgaaaaaaaaagaaccaaaccttttgctatgtgaaagactctgttaacaggatgaaaagataagctacagattgagagaagatatttgcaaagcagatgtccacatgtccacaaatatatagagaatatataagtaattcttaaaactcaacaataaacacaattgaatttaaaaatgggcaaaagccatgaatagacattttactgaagaggatatacagatggcaagaaagtacatgaaaagatactcagtgttcttagccatgaagggaatgaaaattaaaaccacagttagatatcactatacctatcagagtaactagaataaaaaataaaaagaataaaaacagcaaatattggggaggatgtggagaaacaggatcactcacacattgctgtgggaatgtaaaatagcacaggcactctggaagacagtttgacagtttcttctaaaactaaatatgtaacttccatattactcagcaattgcatccttggcattaatctcagagaaattaaaattatgttcacacaaaagccccatacagaaatgttcatagcatctttatttgtaatagcctagaactagaaacaacccagatatccttcaatgactgaatggttaaacaaactgttctatgtcgccactatggaatattacttagtaattaaaaaaacaacagcaatctattgatagatacatccaagaatgtaaatgaatccttgaatctttagggagtcatgctgagtgaaaaataaaaaagccaatatcaaaagaacacatacttcatgattccattcacattactttcttgaaatgacaagtttaatagaaagagagaacagattagtggttgccaggggttaggcatgggagtggggagaggtcattgtgattataaaagggtaacatgagggctccttgtggtggtggaactgttctgtgtcttgatcatatcaatgtcagtatcccttgtgatgttatgctgtagtttgtaacatgtcattgaagaataccaggtaaagaatgtgtggcatttctcttattattattattattattattttatttgtaagacacggggtcttgctgtgttgcccaggttggacttgagctcctgggctcaagtgatcctgctgtctccacctcccaaaatgctgggattacaggcgtgagccaccatgcttggcctctttattatttcacacagttacatgtggatctatgattacctcaaaataaaaagtgtaattaaaaaataatctgcagtaggtgagaaattcttgaagagaagctttatcaaattagtgtgaacggttgtataatgcatgttaggttgctttagttatataaaaaagtactgattgtggttcactttttaatgacaggaagttttgatgttcttaccgtatgtgtctttttatttggagaaaagctcagacgacaaagcattttttttattagtatttggggatatgtttaaataatgctgagcttcattgcttgaaaccttaaaccagtttccatttttaccataaattcagtgttgggccatgttcatttaggacttacttaatggcatgtggcagacagtagcaaattcatgaaaagcaaaatagaaatttacatcagcttccctagcaccaaattcctagggtggaaaagtcagcacccaaaaccttacactggatgttaggagtcatcccctctccccagctatctcctctaggtgtcttccgtgaactctgattggttctgctaaatcaggtgcccattctggagccatgattgaatctcaaggggtggggcagcctagtcagcagcctggttcaggtgcctatacctgtggctgagaggcaggcctttgctgggcagacttgcctggttttccgagggaaaatgctctgggcaaccatgccagtgcctatgagatagatgttccatagaagcatgaatgaatgaatgaatttgagtagataagccacctgggagaggactgtggttgaaaaaagttttttttttttttttttttcacatcactagaacatccacaaaacactgaaaacaaaagcatcaaactcattacattttaatataatcagggccatcagaatgagattgtgggtgaaattatctgagtccagggttggcagttctcactgtctcattctgtctaaacaccctgaatggagctttgagtccattttctcacatcctttgtgtgatggggatggagaattatgaccttctgtataaacctgtgtagaactcgcggtgtgatcatcgatgctagtcttctgtcctgagttaaaggagtctgactagaatgtgccagatcctttggggtgtatcattctttaatcaaaatattcatgtgcatgctgacaagttcttatgacagccaaatacccaagattctttcctgcccgtacctttcatcttaggactgttttcctggtggccactgcagtgttaacttcaagttaatgaaagggcgtgaaggggcttctagaaggtgacagctgggattatgatgttgtgcactgacagccaattctggtttcacaatactcgggtgaccccctgagaagtcagaagtagatcatttaaattataacagcctttgataaactccatttaaaaatgtcgaagaggtagtgagaggatctccatgagtcttaaaacagaggaaaggttagggtgaaagtgctggccttgatcaaactgagttgtcctggaacatagattttcgagattttgcttgaaatagcccacagcacaccatccctgaagagggggtcttaaaattctgttaggtttttggttttgtcttttaaagctattgtttactgtctggagagagttttgctttgctgttttatgttccaaataactgacttcttttttcctttaaggaaaaagaaaccatgacaaattgggtgagcctggagttcaaatatagaatttaaatgagaaaactctcatcctaatctactacagaccttctgaaccattcatcagaccttaaaatgaacctcctgtggtctgtcttgggggagtgtaggggaagagagtgaggaaggagaatgatatgatttttctctggttttataatgaagatgtcctgaaatccactgaatttcatggctctgtttaagattcatttgcaaatatttgttgcaaaatcagcccaccttagaaacccttgtaactttcatcttctttggcagttttgatcttttcttgtgggatcagaagtcactaaaacttcataaactaacaaaagtacacaccagagttgctggattttccccagtacttttctttcagcctgagatttgtcaatggaggcactctggattctaaaacttcctaccttctctggccttataggtatagaatgtacagtttgtgagtgatactggggtgaggggtatgttatgaatcataagcagaaagtagcccttctgcacatgggcaaatgttgcctgctgaaacacctagggagacgaagtttgcagagagaacaaatacccacttttattcaattcaaaactaataaaagatagtaagagttgcactgctttttaaatgtcatgagtacattaaaaataacttacatagagaaaaattgagaacaacctacatgtaaataaattctagatccagtataatttaacgtaatttggctctaaattacaagaataaagtaggtttatatatattaccacaaaagagtgataatcatatatggttagataaagaaacacatgtaaatttcagaatagtatggttcatggcttctattttgtttgcttaaagacagaaagaaagaaggagaggggaggacagtggaggggaggggaggagagacgaggaaagaagagagggaagaataaaggaacagagggagggaaggaaggtgaaggattcaggaggtacacctgatatatttctccactgttagcgtgtctttacaatgaaccccaaatcctttcacaatcataaagaaaatattttaaataagtagtttcctaatattgaaattaataaaaatatttaaaagaaactatttttgtgggtctgtaagtgccagttgttttcctgtgattgtgaggatataacttctgctgatttccaggtatgtttctccctttgcacatgagctgatttgtgcttatcccttgataagcacaggcaatagatacagctacattttaaatccatatcaccttactgatttaaataaattataatgcagctatttcacagtgattcaaatgatgcataatgcaaaatagttcctaattcctgcatagcagctttgtagagttaaggctacacaagtgatctagggactgtttctatgcgagatgtagtacagaaactatgctcaattctttttttatattatactatatatttttatcaatttgatgaaatgcatttgtttgaaaataaccaatatactactggggaactaacacgattagccagtatatgccaataaattgtttgggttaaaaccattaatatgatacaaacatttttcattaatctccacttcattatagtgtgctaattgtgaattctttgtatgagcctagataagatgttagcaaaatttttttgttaagggcctgatagtaaatattctaggcttcgtgggccatacaatttctgctgtaactactcagctttacaattgtagcatgaaagcagccatgggtaatacgtaaatgagtgggcatggttatgttccaataaaactttatttaaaaaaataggtggcaggcaaaatatggcccttgagtcttagttttccaatccctggtctagactgtggacaagactagaaggagaagtctgttattaaataaataacataacattagcatcaggttaaaatctttctgaaaggtgaacatgggaattggtagttgagagcatgactagattgggtaatattcctttactcttctcatttcaactcttttggcaaatgaggatttggggtggatctttccttagactgtctaccttcaataaacttgccagttaaccaatttctgatttctctgttcatcagtgtttaactggagggcaagaagacttggatatatgttgtaaatagagatagagataagaaataatatcaataataaatacagcattttgcaatttagaaaatacttcttattggattctcatgattattaccagtgtcatttccaacttttacacctggggtcctgggcccagatgtatttgtcagctgagttgacagaagactagatagacggagaagctgagagagtttaagagacacatgcgggtatacacaatcagtaagtgcgcaaccacatcatgaatactcatctgaagatttcaaatactatcctattatcttcactatctgagcaggtagagttacctttccggcatggttcaaccctatgtcattcttctaaagatttgttctatagagtaaattctagttcagatttgtgttttaaaagagtatcactgaatatgatgtgttgggacatttatgtgataatgtatccttatggagctgtggtgcccatcttagtagaaagggcacaactgtttatatgtatgaagtgtaaagtgaagactaatacaatagttagtttgtcatttatttctatccatctgggaatctctcgaggttgttttatcttggaattctctgtggctgtacatagacaggtctgctgaaagctctgtgtgtgtggtgtgtgtgtgtgtgtgtgtgtgtgtgtgtgtgtgtgtgtgtatggttgtggatatggatgggtgtccatactcattggttctgccacttagccaaggagactaatcaagtgaaaagctggcttactgttgcctggcagtgacctggtggttgtgcccctgccatttctccccagttcctaccaaggagatgctatggagactgagactgctgcttgtaaaccttgtcctctggtcccctgctttcagtgcccatgcctttctttgcctgtgacaactgcttgggtcccagcagcacccatgcgtcacctgagcatcctgtcgaccacacagcctgccctcttcctgaggctttttccctggtaccctgtcttgatatcagttttgtggagctttggggtagcactagtgaaacagaggtagatataagaaataatatcaataataaagagcactaaaactgatttgattgatttgaaactgatcaaatcctgagactcagggggagtagtatgttcccagatacagttataccttatcataaatgttcacacctcacatacccagaactcacccatccattcactacttggactaccacagaggagcaaagccatttactctatatagggccccttgaatgccactcagagcccatttactcttacttggcatacaattttaaccaatttggctattaactatgaagggaaagcaattaggtggggagggcgggggaagaagtatccagagacagctttctctttcagcactcctcatcccaggaatggtgccactgtggatccagatgccaaaacctacacctacaagccattttaggtccctccttcagtctccaagtccattgattctccctccccggtaatctccagtccccgccccccatatctagtctagctggccctccgcagttactgtcatcattgtcttctcccagcatctcagccctggccttggtgcagagttccattccgctggtcctgacctccagtgcatgtgcttccacatgaagcagataggcctgtggaagcacagctgcttagaggacttccctgcttgcatttcatcaccttccccttgttgttaacacaatggcaaactccctattagtacctagaaggggatacatccctgtttgcccaggggttagtctccatatgtatgggctctcacggactagttagtaaaagcactgcccttcactgtcagaagcgtcccagcttggatggttggatcattaggccccctcgtcaagccctgcatgatacgccttttgcttgtgggttctcatctcttgctagtatgacctcttcccacccctggtctccaccagctttctctcttcgtctttcctgatccagccaaatcaaaattcttctgttcttgacttcaccatgcaccttcttaaaaccagaccattgcatatgttcttttcccttctctggaacgcgctgtttctctccttcctgttctcccacactccttcttcgcctggttaactctttcccattttctgatctcagataaaataacattccctttaggaaatcttcccttcccacctaacaaggggctcagtggcccctgtggtcttcccatgaggccacatgtgacctagtttctcactgccctccccacaggccagcatctcatggacaacattgtggtcaccactgtctccacggcacacagcatagggtcaggctctccatagatagcattgaatgaaggaagaaagaagcacatcccagccaatcagtctcctggccaacctcatcccctactgcaaggttttccctttccacctgagataaaatctaaccttctttcattagggtgaggccttctttcattaggaggaggccttgctgcctctctgtctactagccagtctctgatcttttcccactgtgggcaccccacaccctttcccacctccttagggcctcagcaccttgtgagatctcagctgcaaggtcatcttccctacctccccttctccatatcaccttgccctgatttttgggagcccttataacaggcatttctttctttcttttttttccacttgctccttgacctctctctcccaccttcacccctgaaagtctcagtgggcacttgtactcttgtgttttctctgctgcatctattaaaagggtgtctagcccatcgaatgggcttaaatattactgaccacataggtaagtgaatggataaggaaatactagatttcttgtcctgctatagtttaaaatggtcttgagggtaaaaggaagagtgatgggtgggaaaactgacagctgaaagagtaggagctgatcgtgtggtatttggggagaaggtgaaaaataaaaccatggataaaacaaccaagaaaaataggaaccctagatcccgagttgtctagggttttgctatgttatagcaacacacatatatcccattgcagttactgttcagcatgacaatttttagtctttggggtgaatttaaattctgttttggtgggagaaggtaattttagaaatggaaatgcctcatggttaagatttaggttactgcagctttgagtcttagccatggtgaccagccgtgggcactggttgtgtcacatcacacccctgtgagctgccctttcccatccatagagcgaggatcagtactaccttggggctgggcgtggtggctcatgcctgtaatcccagcactttgggaagcccaggtgggtggatcacttgaggtcaggaatttgagaccagcctggtcaacatggtgaaacactatctctactaaaaaaaaaaaatacaacaacaacaaaaaaattagccgggcatggcgatgtgtgtctgtaattccagctacttaggagactgaggcaggagaatcgcttgaacctgggaggcggaggttgcagtgagccgagatcatgccaccgcactccagcctgggcaacagcgagactccgtctcacaaaaaaaaaaaaaaaaaaaaaaaaagaagaaaggaaaaaaaagaaaaaagaaaaaaatctaccttggcttcagatacatgtcccagtggggctctgttattaaatgggataagagcttttagaacattttgcccagtgcccagcatcttaacaaatgtaattatttactcaaataataatgatgatgagtgctttattgagaggtgtttacatcccagatggttcgaatacagaaagacagaggatataaaggatacagtgcagtatcagaacaagcctttcccaggacatctctcccaggaagatgagtccttctgtatggagttctcatgtgcataccttaataccaagtcctctacctttcgacatttttaatggaaacacccaaaccactaagttagaatgtcctgttcatgatttcacaaatatttagctaatgataatggggattttagaatatggcacagaaacaggtccacactttgattcacgctcgtgtccttggccattggtcaacatagtctctgagtaaaatgcggtgaaattacccagagtacctggaccactctgcagaccactccagagacatgttagcaaaacaccgtttgtgatgctctgggttttcgtggccagcatctaatgtccaaagaattctggttttacactaaaattgatgttatttttatggcaggtgacaacgataggaagatatgaaagaaaatgcaactagcaagaggtcccaccgtgcattttaaaatcgcgccctattgagttgcttgcaggtgcggccgccttggctgttatatttataactgactggaacattgtgaatgtgatcaggacaacaggaatatagtcacgccatccccttaaactcgggttgccactcctgactttccacagcctcatcttgcctttcatttgttcatcacatactctgagggagaggaaatcaaacccttggatcttatattttatattagatgaatctagaaagacttgctcagaataaaaagctacttggaggaaccatattaaatcgctatttttgtagatcaaaaagtggtcaaatgtcggcaatttcatgtgaatacagcctgacaactcagtgtttctgttagatgttgctatggtcaggccctttattggacagtgacctcaggtgtaacacattaacccacatgctccccaatttgtattgtgaattccattaacagggagctgagcttgagcatacatgagtttctgttttttcttcccggtgcttcacgtaaataaataaaataactaattaataaggtgggggggaggaaaaaacctctggtaggcaaaacggtggtctttcacatgcagattatcccatcaatgcggggaaaagcagccttgtttccttttcctgccctcaaactttaattatttctgtgggattaaactgttgcttttgctaaacctggttaaaatgagctttgagaaatcactgaagcttttagtgccgcgtggcttcactctgctcgttccttaggtctgggtctcagtgccaggacatctgagcctgccaggcacacgggcagacccttgggtggctgccagggtctctgcctcagctgtgatccctgagcctggggaggaccatccagatgccaggtcctatgttgtgctggccaagggacctggcggcataagtctgctggcacagcctgtgcacggccccggagtttttatttttttgcctgaaacactttcggactggaggttggagctgaaggcatttcccaggaaggagctgttgtcttgccagaacgttgccagttctgcggtttcaagcagtgttcgacgcaccttcatggggttgggggagatgaaatggcttgggtagaaggtctgaaaaatagtggaagaaacctcctgcagctttactcccacctgcctaaaccctctgagtttccctcactctgggtcatgttgctaattcaggagcagtctcttctccattaaattcatccactgcacaaagcagaaggtatttctgcttgtgtaactgcctctttcttatccttagagggagaagatgatcctccatcggtaacacttaaaagattagccttaagtctagcagctttcgtgggtatttgctacaaactcttgctgggtcaagctggattgacttcattgaacagccagctgggtcttgcaggagaacatgcagcacagatcagtatgccccggttggagctgagttctcattagcattccactcaggggtcaggagctgagttactggcttctcctcaaggaccactttggggatctgcagattgctgagtaaccaagataatgcggtgtgctgtgaggcaatgagggaactgactatttttaaatagagagcctcctgctgtacttgtttttggcttttcttcctccccagttgtcatgagcctcctgcgctctggcttcattatgtgagcgtctaatgagccgggagtggaagctgtgggtctcgcagggagcaaacatttcaccagtgcagcccggacctagcttctggagccatccctgtcatgacactccctgaacctgcacttgatctcgttgcccagacatttcttcaattttgactcactttcatagatatcagatgttttgttttgggttttcttgtgacgtccagatcatgtgcccaaagtcttgcaatcggaattgcacgatccagagtggctaaccaagaccacagtcttgccacatttccattgttagacacactatgctggaggagacttggtcgacatttgactgtgcattttgacttatttactttctgaaatcccattctgcttatcaagttggtggatgaccaaaacttggctgggcctaagaatcttaaagacaacattgttttgttttggttttctttgtagagacagtatctcactgtgtcattcaggctggagtgcagtggcatgatcatagctcactacagactcaaactcctggtctcaaaggatcctcctacctcagtcagtctcctgagtagctaggactacaggtgtttgccaccactccagggtaatttttggattttttatagaaacggggtcctgctgtgttgcccaagctggtctgtaactcctgggctcaagtgatcctcctgcctcagcctccctaagtgctgggattataggcatgagccaccatgccctggacaagatttttaaaagtatgattcctgggcccacccaaagcctgcaggatcagaacctctcagcctggaggcctaggatgtttttaacaagcttccaagggaatcagtctgttgcagtctgtccaccgacatagtattagacactattgggatctaacacaaccccaaatcttataccccagtcactagtaagaaactctagcaattctgcttggatttgtttgaatgtcattacatgaaacttcatgagcatgtgcttctggagtctgatttaaatgtttgactcatttttggagttaaaatattaaataatttcatggtacgatatgccttctaaacatgtttattttttgctgatgtttgacactggctaattttaatagctagcacatcaaactaatagttgtgaaggactctgtgcccagttgccagttaaagaaaaaaaatactgttttcttatttgagcctttgaggacactgggaaataaaaccaggcactgataaacactggtaggcatttatgtagagaaaaaaatgtccataaatgcacacagtcctccaccacagtgcctggttcctgtccctgtgtctgcagcaagccatagttgccatcaggactggctacataattttcaagatccagtacaaaataaaaatgcagggcttcttgttcaaaaattattatgagcttcaagatggccaatagcaaggccaggcgtggtggctcatgcctgtaatcctagcattttgggaggccgaggcaggcggatcacctgaagtcaggagttagagaccagcctggccaacatggcgaaactccatctctacaaacaatacaaaaattagctgggcatggtggcaagcacctgtagtcccagctactcgggaggctgaggcaggagaatcacttgaacctgggaggtggaggttgcagtgagccgagatcatgccactgcactccagcctgggcgacagagcgagattccatctcaaaaaaaaaaaaaaaaaaaaaaaagggaaaaaagaaaaaagagagcagcagcagagcattaaaccaagggcagaggccgtctgagcacagagcatatgtgaattatacaggtcacacacccatgaagctaaccctggatttgtactcaaatttcttagctctgacgataaatatgttctcttttctacctgtttgtggggtgccttcaaaagagtactgacataataaaagagtcctgaattatgatagagatttttgaagtaaggagactgaattttagggcagcctgtctttgttattttttaaaccagcattcaatttgtttccacttcatttgcaacggcgtgaaagtttatctgaccactggaagaggcaacttctttactcacactcctcacattgcagaaagggcctggaatgggaccctttcaaagcacccacctcataatctgggattccaaactcaagttgaagcagtgcagtgtctgctgttgtttagacattctcgttgtctaaagctggagggttttgtgggtggtccctctctgttcggtgtcactatcaacaaatgtgtggaaagaagaaataaccggagatgagggcaagcttcaatcagctatgccttaattggtgagtcagttgcactggacacaggcagaatcaattaggaagctggactcagagggcgctggccgtgcagcccgcccggcaggaagagccagtgtgaggctccacagaagaggaagaagcgctgccccccaccacctcctcctcctaaataaggctccaggactgctgagttgcccaaaagtgctcaactgttttcagttcttgtattttccaagaattcctactacctaccaggctctctcaaccccatctatccaacccctttctttctttcaagggctacccctctggggtatccttaggggtctctctggctcccagaagacaagtcctgactcaacttccttcctctgtgactatgtctcagcatcagtctagctttcttgaaggcaggatctatctttcgtccatgtcttcactgttcctgacccggggaaggctgttcgttgtatggtctaagctggcaagttggatgatggcttcaaggctaagatttcaaaatgtggaatactttcatacagacatgctgggaagaggagcacatccacagcaatgacgctttgtctgtggaatgatgttttctcatgtttaaaaagcccgacaatttcttactacacgaaacaatcaagaatatggataagcaatagcaagagaattataagttgcatgtagttcattgtgacaaagaaccaactctagtatttttgtgtttatctgcaaggccatcattttattagatatgcatgctttaaaaaaaaaaagtttaacttatctaaatgtctttttaaaataagagtaaattgggatagcccttacagaccctgaaatatcctactgtattttagatggatacatagcattccaacctccttattattgaaaatatagcttacttctagggtcttttattttttattttttgctattataaacaatgctatgatgagcatcagtatattaatatttggatttgtttaattccttaggatatgggcctgaaattgagttaaatggtatttaacttttgcccacatgtaaaaccttttatgtgtgttgatttgcccattgattcaacaaacatttgagtgtctgccttaggctaagcaccattaggactttaggggtataatggggagcaagagtgatgaagtcccttctcccatggagatacaagttcaggtggaagaagacagataataaagtattgttagacccagactttagaccccaatgatgccagcactcacactgccaaccctgatctcagccctgcctactcaggggtcctttggcatgttaatcaggaatgtaagtttcttgtatcgaaaaccaaactcttggccttacctccccaaatcacaccttctcctagtcttcctcatctcagcaaacagcagtcctcctttccaagactcagaccccaaatcctagcatcatctttgtttcttcttcctggaacccacatcccagtagctagcaagtcctgtcacctgtgccttcaagagagccagcctctggccacgctttacccactccactgctctcaccctgggctgagccaccattctctgtttcctgaatcttggcagtaaccttctaataggttgtcctacctttgccttccccagcccccacttgatccccagcatccagcctattctccacgcaagagacagagtgctgtgccttgttaacataaacatcagatcacatcccttctgtagtcaacatctcatgaaggccgtactgctggagtagttcgcaagggctgctgtgatgaagtaccacaaagtaggtggcttaaaacagcagaaatgtattgtctcacagttctggaggctgacagtctgaaaatcaaattgtcagcagagccaagcttcccctgaaacctgtagaggaatcttttttggcctgctcctagttttggtggttttcctgcaatctttggtgttctctggcttgcagatgtataattcctgtcctctgtcttcacgtggcattctgtgtgtctatcttcacctggtcatcttttctaaagacaccagtcatattgcattaggggtccaacctactccagtgtgacttcatcttaaggcagctaattacatctgcagcaacccttctaggactgaggattagggcttcagtgtatcttttgtgggggacacaattcaacccaaacactggttgaaacccacatgcctaatgatggttctgagaagtttcaagctcctcaccatgcatgataatggcccttatcctattgtggactcaccttctaaccccatccattcccagtctttattattcaccagcatttcagacatgcaatgacttttccagccaaggacttgcctcgaatgctaccactcttagtgggaccaccctgaccacccaaccacagcagcccatgctccctacttcactctttctcacccaacccaccatacagaacacttgtttcttattgttacgctattttaccttaaatatctttaaatttatttggtgtctctccccattattgcccccacccactagtatgtaagttctatgaggccagaggctttgtctcattttccagtatgtagatcccagaaaagcatgtgccagtccttctggggacattactgtgaatcctagtgcacgtcagaattagataagtgagtttgtactaaatgcagacaggaactgattgacagctgtgtggcatgtataaataataatctataggagaaatcatttcatatgaatttgatgatatttgctccagctcatttgagtgacttttcttctgtaatgccttcagattatggtgcagactcctttactagtagaataaattgaattttaattctgagatgagtacagagtctgatccatttctgtagcttagattaactattcttcctttttctttatttgaaggcagaacatagcaatgaatcaggggaagggggcttatcaaattgcattagaaccaggtactattttcacttgactatgtaatgtaactttatatatatatatatatttcatttatgaatcacataataacaaccaatgcattcctcctattggcttcttgttttatacttttcaggggctggagagcagcctttctagggttgaaggagttattttcagtactataagaaggttggaatagtcgatagaggaagtctctttcagcacaaggaataggctggatgctggggagcaagtcggggctggggaaggtagaggtaggacaaccagttagaaggttactgccaagattcaggaaacagaggatggtggctcaccccagggtgagagtggtggagtgggtaaagcgtggccagatgctggctctcttgaaggcacaggtgacaggacttgctggctattgggatgtgggttccaggaagaagagacaaggatgatgctaggatttggggtctgagtcttgggaggattgccatttgccgagatgaggaagactaggagacgccattctgggaaacaaggcacatgaagtgagttgaattcggaggctcccgctcgctccattccagcctgcatttgtggtgctgcagccctgcaaatgtagccctgtgcgcacacactggagcactggatccctgggtcatgaacaagaagacgacgtggcctgaaggctctacttcttttcaccccctctctaatccctctttgctcaactctgactataaaagtctaaattaacataatcatagtatccacaaccttttcagcaaaatgcacctatctcccagtcctgtgctgcagatattcgcttcatgcttgcctgcatattcctctgagtcacttcagatcctcttcactacttcatatgactttttgagaaacatattttttaatttgcctcagaagtgaagttgaaaatcttttccatgtagtccttcgagccagagaagcagtaagtggacaaaaacccaattttaaggtttccatttcaatagtattttgccattgccactgagaatgaacaacattaagggagcccctgggcagaggaattggcactgtgcaagggaaggacatactttctgtatctccagtgggcatgttcatgtccctctagatctgtttctccccacctcctgtccctgaggtcatgcggcactatagtttctgactgtggaatggctccccatgcagctggtttttttgttttgttttgttttttgaggcagagtctcactctctgtcacccaggctagagtgcagtggtgccatcttggctcactgcaacctccacctcctgggttcaagtgattctcctgccgatgaggccggactccctgcatcattgccatcccctcatatatcccccggcaagactctccaagtgatgagaaattcccacagtgccgctacacacaatagccagagtaaaaaaaaatactgacaatactaaatgcgggctaggacacagagcaattggatctctcataggttgttgataggaacgtaaaatagtgcagccattctggaaaacagtttggcaattttctcataaatttaaacatatggatactgtatgactttacctatgacccagcaatcccattcctggatatttaccaaaaggaatgaaaaattatgtttatacaaagacttgcacatgaatgctcctagcagttttcattgtaaccacccaaactggaaacaacccaagtttccttcagcacgggaatgaataaacagactatggtacattcatacagaagaactgctaagttaaaaaaagccagtctcaaaaagttacatactgtatgattccatttatatgacattctcaaaataaaattatagtgatagaaaatgatcagtggtttccagggactaggagtggaggggagtatagggcgataaagggttattgcaagggagtttctttatggtgatagaacagttctgaatcctgattgtggtggttgtgacacaagtctattcttgtgataaaatttcataaaattgtacacacaacaaaaaaatgaatgtgaaaactggtgaaatccaaatgaagtctgtagttaggttaacagtgttataccactgtcagtttcctgggtttgaatattatactacaataaagatgttatcattgggggaagctgggtgaagggcacaggaactttctgatactagctttgcaacttttatgtcagtctataattattttttaaaaggctttaaacattcccctaatagcagctaataattcctgaatatttgctagtttccagccctttgctcatctcatttgaccttcccaacagccttgtctggtgcattctgttttgcccattttatggaggaagagatgttacgaaaatcacacacacaataaagagtagtatggctaggttttgcatgcacgtggcctggctccagaatttgtgtgtttaaccaccgtaaggtttttcctcccttgccaagctttgagataacaaagactggtgtagaccatgctgtgtgtagaccactttgctggaaatctcagtggtagtgctcaaagatgtggcttcatccttgctgcttgctatgatgaacatgactcttgcagatttaaaaatgtcatggccaaatttctttgcgcaataaagtaatgtgttttaaaagaatgcacaatctattgaagaaatgtataactagggaccttcttgccatagaagaggcttgcaggggatagaggctaagtagtgtggggaggtgaatggaccccatgacgttgaagccattgagttgtgatctggagtctgatacttgctagagaccttgaggaacttaacctttttcgtctgttttcttaactacaacccaagaacctatgcctcctgactgagcaattgagggggtgttatggactgaatcatgtccccccaacaactgtgtgtttaagccctaatctttaatgtgtatttggagatggggcctttaaagagacagttaaggttaaatgaggtcataagggtgtggctgtgagccaatatggtagctgttcttattagaaaaagaggcatcagtgatacacatgcacagtgaaaaggtcactaaaagacctagtgataaggtggccatctgtataccaagaaaggaggcctcgggagaagccaaaactgccgacaccttcaccttagacttctaacctctaaaactgtaagaaaatatagatctgagtggcttaagccactcagcctgtgatgttttgttgtggcagccctggcaaattaatacagagggaaactcagatagactctaaacgtgtttgaaatatctcaggtcctgcttgcacatcaagtgacaaggatggctgtggaaacctggcatctaaccatgtttcttagaaagagcaagttcatagcatgcttctccttttttattggcaaagcaggtgtttctcaaaaatgtacttgaggaaatagcagttctatgatgtgatcttaacacgtccgctaatagggaacagagaggagggggttttgtggtcaaagaaagcttaaaatgacaaatgaaaaaaattttaaatatgcttcttcaccacacgacttctcagagcttttaaaatgcttgtgtatattgtgactctctccaagagttaaataatttattttatggcatttccaaagcattttctaggaacaccatttaatcaagtaagttttgtaggtggtgatttgggaaatgttgttgtgtacattttcttggacggccataacaaagtaccacaaacttggtggcttaaaataacagaagtatattgtcttacagttctggaggctagaagtttgaaaccaaggtattggcaggtcatgcttcctcggaagcctgcaagggagattccttccttgcctcttctagcctctggtggtggctatcgatccttggccttccttggcatctagatgcatcactccagtctctgcctccatcttcatatggtcatcttcaccctgtgtgtggctgtgtctcttataaaaacgctagattaggggcccatcccagtgacctcatattaacttaattaattacgttagtaatggccctatcctaaataagatcacattctaaggtactggggtttggacttcaacatgtctttttgcaggacacaatttaacccataatacctgccaagtactttgcaatgattgggatacatgccttaaaattttacttggttacttttcgtttttgcttctttcaggctaagctgctccttttaattttacactccttaaagcagaggattttaatttgcagtgtagcagcagaatcataatgcttttttttttttaagtccgtttcaatgccctacccacctcaagactgattcagtgggagctgggtgatgggtgttaatgcaggtttgtttgaaaactgaagcatttgacagactagatctgactgtatctggcttctatatttcagaattttccaggacccatgttttggatcttttcttctttcctttttttttctttttgagatggagtttcactctcgtcacccaggctggagtgcagtggcatgatcttgactcactgtaactgtaaccaccgcctcccagattcaagtgattcttctgcctcagcctcccaagtagctggtattacagacatccgccaccatgcccggctaattttgtattgttggtagagatggggtttcaccatgttggccaggctggtctcgaactcctgacctcaggtgatccacccgccttggcctcccaaaatgctgggattacaggagtgagccaccacaccctgcctggacattttttttcaaatacctcttctctaatccctggcttttcttcgccaaatgtagcatcgccctctttgcaagtttgtggacagcattcatgtcccagtcttatcccagaatccaggaaagaatgtgtcagtgagtgctgtatctggaggtttgtcctaattgagggactcagccaagcctcgtgcagaaataacctttgagagtttgtgtcaaagtcacaactccacctgagcaaagtgtgaatacagcctagctggattgaaatacatgtcacacctaactgtactctgtgcatgtggttctgtgtgtggggatgcatggggtttagctgtgtttttgagtcacatgtttctaattgtcaaccctttctcagacggtatttctgcttcaggaggttatttgaatcatcttggctaagcagccttcaaataactctctctcaatttctgcatgtcaatttatgtcccacttccaaagactcagactgtgaatgacttctctccacagatagggtcaccttagccaggtgctcttttgtctttgtctttaagatccttggtgtgccacttattgattcagcagtggaatcatttttcttctaaaatgctgactggaagggccattttgttaatttagtgtgcctgcttttgtgctcaaatgagtagtttccataaaatgagaaacatggaatgatgaggcctggggcccaggactatccagtctctttgctgacttggtctcagaaagggggtggagtgcagagaagaatcttttcaaacttggataagaattgccatctttaatatgtgataccaccttgaaaattatattcagattttggcaggatgtggagagagaagagtgaaaaaaaaaatcagtgcctattccagaatcgcatattggagttatgtggcattttctgttttaaataaatgaattcagcacacatactgttaaagggatgtttgttttatctttcgaaaaggatcatgcatcatattaacttattcctggtgctgtacacatttgcacaaggactatattaaaaggaagagatttaaagaaagaatgccaatgcccccatggtctgtcccaggagttgggattcacaccagttctgttcattctactagttggctgtcccagggttggtttccttccccttcctctgctccccttgggaagaggaagaggaaggaagtgaggaagagagggaagtgagggcttacagctgaaaatcagcagagccaataaggtgggttccataaagcacaccctgttggaggagaatttctttttcctaaatggtctggtgtttcctggtcagacatctttgatctgggccggtttcagggccttctcctgattgactgaggaaaccctctcatggattctccctgctgttgcactgacattaatcattttttttagactcataatcatagtctacctggaatcagaagcagcccaaggaccgtgagcaacagagaaaaaggccaagttggctttatggaagtaaagtcagggaggcccgtggaaggcctgaaccccaagtgaaggaccttctctagctcctgcatttattatctttgtgaagagtattatccagatgtcagatgattagcatattttgctagtttctctgtgatgggaataatgaattctttctaaatttcctttaatttcaattagaggtgagtagagatatattaattatactcatgaaatctactgcctaccaggtcaaaaagtagataaggtccagggcgctgggaagatgccctgataactgagaaagagcaagctctgggaagggataagaccagcggatgaatctgaggatgcctacctgctaatcgccccatttaaaacttagtttttcagccagctgaaatgacccaccagtctacagtggcagacaagactggaccgccttattacccccacagtcctacattgctgggataagcagtctgtgcagaggaggggcccctgtatttgctgtggctcagggatacaggaaagggttttggtgaactgctgtgaaaatggaccacccccatgactagacatgacaagcatcctggccacattcacaggtggatacaaacaataaatgtcatgagactgtctccactaagtggatcagagtcacagtggatatttagttgacctgtgacttaacggccacagacctcttacagtgtacattatgtttattaatttgcatttttacctgccaggtagactgtacatttgcaaagaggtgttttgcttcagaaaaatgacttggataatttaacaaggtatatctttgatcttccaacagtgaattcaaaaaagaaaaaagtttcctgtattggtgtgtcataaaagtctttgttgcagagatttctctgctgttttgtttcccttggtagtgactgaatcttaattttctgtaatgggagcacttatttcatgtcctgaggatgaaaatccatgtttccatttcttgtgaattacagctgtttggttttatagcctgtgaatggccctgggcctctcttgccttgttctttgaggtccacgtttctgtttactcatggtccactgctgctaatctaagggtcgctgagaaggctttctatcccatattatgaacctacagcatgtcattccatcttacctctgagtcttaaggtctcttgatccttaaacaaccactgtagccaataacttagtgaacacaaacactgaatgcctggaagttcctgctgagtctggctccttgctgcatttccaggctcatggtgcgctgtgttcctttttcctttctttgctctggattccatgactttgttacaattatttgtgtatgctctgtttcctcctaccccggagccttggtacctacaaacactatttctccatctaaaaatctcatgctctagcagccctgcctttacctccaggccctcctttagtgcctctgttttatactacgaaatacactaccaaatcaccatgagcctctccctgatggtacttgctactcctgcatgtagctgtgtgcttattgattgagatctctctccactggcctgtgaactctgcaggaagagaccaggtctccccttgttcaattgatcaagcacagcatgttgtacttggtggcttcttaataaacatttgatgactcaatgaatgctgcaaggatattgggataaaatgtgtaccatgaggaaagggaaggagagtctttggtagcaaagatgtggggctaatataggcagacctcacttcacttagaccagaggacgttgtacctaatgggtgtccttggaggccccttccattgctgaggatagaatttgaattctcactatggtactggcccagggcagagcctgtcttactcaagcatgaaactcttgcctatttcatcaaattgttctaatgccaatctttccctcaccatgtttcctgtccttggagtaaattccaggccagggtctagcaagtgcttccccactgtatttacttgtcactttgcctgtcaggtttttggagtaatgtttgcatcacattttgtgcaagcttctcagatggccatgttacacttttcttctttgcccttttacttggccctcttcagttatttttttctcttcctccttccttctcattccccaggtgtatgctcaaggaaaatacagagataatagagtgtaaatggttaagaatggtgaatttcttggttccttagagaaatggccgattctaggttaggggcagaagatgaacaagatgagtctgtaacctcttgcttattgtgatagcaggaagctatcaactactgtatggggccttggtagcaagtctgaagagaagcggctcccactggccaaagatgggataaattaaatatccctccaccactccccaaaaaaacacacaaaaatcatcaacatttggaaacatataatatatgttacaacccatgctgagactaaaatgatgaagcagaaaagccattgatgatactaaaaaagaaaaagggtgtgggagatcctcattgatcaccttcggaccaatctttattttgaaaaccagtaaagaaatgaacggcagctaacatttatccaattttcttctacaagtggttcttcagctgacttaacagtgcaaaagaggaagcacttcttcgcagaaattggttatctaataaatgaagagagatgatgaaattaaaatatcactatgttgcagcttctgatgaattaatgaatctgggcattggtcgttgatgactaccatcatcgcaaggagactactactcatttgttggagggaagtaaaaaaacatcacgaatgaatagcaaataaataagtaaataccaaataaataaataaatatgtagtcaaatctgaatccaatcaaactgctcaatctcaccatcaattaaaatagagggacagaagaacatgttaaatgacacctcagaaatacagttagtaaaatctggattctggaatgctcttcatgaccaacaagttatttcttcaacaaaacttgtgagaaaaataatggagagggaactctagaataagagacttaagagatatctcaatcaatcacaatgagtagatcttaacatgaatcctcattcaaactgtgtaactgtgacaaagtgaaacgtggtttgtttttaaaatgtttacagatgaaataatatgatatctgggatgtgcttcacaataatctagatgagtatattagttatctgctgttgtggaacaaattacccctaaacttaatagctaaaacaggggtccccaacccacaggccacagatcaaataccatactggtctctggtctgttaggaaccaggctgcacagcaggaggtaagtagcgggtgagtgagcaagcattaccacctgagctctacctcagatcagccagcagcatcatttgattcttacaggagtgcaaaccttattgtgaactatgcatacaaggaatctaggttgtgtgccccttatgagaatctaagtaatgcctgatgatttgaggtggaacaatttcatccttcgccctgccccgctaccatcccgggctacctccccatacccctgtccttggacagattgtcttccgtgaaaccagtctctagtgccaaaaagattggggaccataggcttaaaacaacaaacatttattatctcatgtagttcctggactcaagaacccaggagtagcctgactgggttgttctggctcagggtctctagtgaggttgcattcaggatgtaggctgggggctggtcttccaagggctggctaggatggaagatccatgtctaagctaattcatatggctcttggaaagagacttcagttccctgacagctgttggttggaagcttcagtttcttactccatggcatctccccagggctgcttccagcaaagcagttggcttcctccagagggaggtatccaatagagatcagacgagcaactgtgatagaagccatagtgttacttacaacctaatcttgcaggtggcataccatcacttctatgacattctctttgttgcagacaccaacccctggtgtaatgtaagagggcccaacacaagggtctgcgtatcagtgggtgagaatcataggaggccattttggaggctggctgccaaaagggacgtcgatgtagatggtgtcaggatattgataaaacaagattggctgtgagttgatcattaaaattttctaatataaaaagtttctggcaaaaaaacttttttagagaccaaatgcttggatataagctccagctctaccatttattagctgtgagacctagtcaagtgatgtgaattcattctctcattcttaaaaggagggtaataagagtacctaccttctgtctggggattgctgtgaggattgaactcatgaggactcagggacaaggctggtgtgtagagggcacccagagaatattagttgatggtagcagtctcttctcttctgtctcgggcattctctttctgctgggcctgaaaacatccctggaccacctattttctagaaactcttttatctaacttttaagaagcatattgtgatatccctgggaaaagctaccattttttctttatctgatcttctcactacatgtatgtctgcccccacatgctgctgcagaggaaatgagtgcagtgagagcatgcatgtggaagtgcatgtgttttggcacacctttgctaccctggcctgcatcagtgtgtttttctagaatatggaccttgctactgccactaaaaggctgtacctcttctgagaagctgcttgtaagtcgactgttcttatctgtccagcacctctctctctcatcctttacatgaaatccctctgtccttagaaaacccatttggtgaagtcaggtaggactttccccatttctccccaccacaccctcaagttcagacgtggtgatgcgatccagacctgaataagtcagaggtcccattctctggccacctgattggctcaggcccagacacacatcctaagttggcctgatcagagtatttctggggacttttctgatagcaatattgctgaaactgctcttgggtaaagttgccagattttgcaaaacaaacaaacagggcactcaattttaaatatcagataacaaagaatacatttttattatattcattgttatgtatccaaaattcaaagttaattgggcatcctatatttatctggcaaccatagctcttgccagtgggcaggctgagctaggaggatgtgagaccactgatgtaggcagctgtgtgctcaagagcttgctgggggaatgaaaccaagtagagccaggagatacaatagagaagacagactgagccctgaggccaccactgggtcccctgtccctcccttcactgagacagctgcactcccagtcttctcgttctaggagccagtgactttcctttttctgtatgtagagtttgggttttttttttttttaattgttgttgtttgtttctagaatttcaacttggatactttcatagactaaaaatacagtgccataagggattgtaagccacaggtgccctactaataagatctagtgtttactgagtgcctactatatgctgaactctgtatgaagcactctgtctacattatcttattaagtcctcacagtcactctgcatggtataaatgaagaaattattgactcaattctttatcttccatgaggttgttataattatcttactacacatatgcactacaatgtgagtacaaagatgtttactatagtaatgttgaaaacataaaatactgaaaatttaaactttcactagtaggggactggtcaaagttcaaattgatgttgatacatacatatatatatatatatatatatgcacacacacacacacacacacacacacacacacacacagtgccttacagggtatttgtttattcacagactcaaataagaatggaagaaattcagacaattaagtttaatacccatatgtaattaagcttggcaaaatacagagatcattgaaacacattttaattgaatacaagttttataaaacgctacaaatcttccaagtgttcatacagaaaaagtccaaatttaggtgtccctggggtcacatttctttgctgagctttcccagaaatgaatgtagccaccactgcttggggaatatggctcctaacctgtgtcttagcacacgctgctcccccaatcctgggccatagctttgcattgagtgcaaagaactgtaggtgtgactgcgaggtgatggtttgatgcagacgagtgcgctggcacccacagcactggtcagcatcacattccccctgggtgttggctatcaatacgtacctcttctgagctgaggcatcctcagagctggcactgtgtttgtaatgaattgaaactgacttcagtctaccctggcacactgcagccactgaaagcattcttcctccaagaaacgcatttgaatcaagtcaagattttcatgaagttcataaaggatacatggagacctttggaaatttcagaaagacgtgaagggtgaggcctactgtgtacacacactgccatgccatgcagaaacacaacacaggcgtcctgtccatgcagcactgggcttcagcttttcccaggctttcaggggttcgcaaagcttagttccctgagatgcactgacaagtccacatgacctcacaagaaggacgatgagctcacataatacgtctcctcttggagctggccttgttcacaggcatggtaatcatcatgtccctccccctcagcagttacttggaaatgtgcactgcttaggtggaggggctgttccactttaggtatttcccaattgtagagaatcaccaattctgagctcatcaccatcatcctgcatgaaataattagtgcttttgccattgaaatgaggatgtagctaatctgactacctggatgaaataatgttcattgttcacatccaggagatctatcttttctctaatttggcactggcattaaacagctgctaccttcagacacatcaatttgttacacacacgtaaaggacaaacggggaatagctcagatgccattctatcagtgtctgtactgtctcccccaaattgcaaacagctgggcctgcctccttcctaccagctttcttcagccattctgttttcttctttgagaaataccatgtcactgcttcccacgggaattaaatgacagtctgatttacaggaacctaggcttggtggtagccatgtcacaagatatgtgccttacctacaagataatattggctctgcactgccctaacatccctgagagatttgccccaaagaggctgtaaaagtcagccaagggagttctcagactaaatgggaatatgagagactcatcccaggttgaggttagggttgggtgtgtgtgtgttgtcaggaggaattagatcaagaggaagtgtccagatttacatcagataatcttgtggtgtaatatccaaatcagcggggaggacaggtgtgggcaccctttgagcctctgaaaaatgggcttctgcactttgggtttggagcacagtagtagtgggaccacagaaccccatgagcttatctggaagtctcactgaggagttgggcatcagaatagggtggacatggctgttgggaccctgctcgtcatttaggctgataggagccacatctctgttttaggagaaagcaggcaatcctgtgtctgtttactgacagaactgaaaatgaaagaggctctacagaacactcttacctttaatgccttaattttaattttccagtgagctcgagctacctgacagccacagtgcaaagtgacctattaaagtgaagtccatttgaggatacctgcactgtagcagcacaccagaattctgtgctgcgtgtgaacagggcagcaaggagcagcagacaccatcttttgggtgtctcctctgctcacaggcatgctccattgctccactggatttcacgtacaaatcacagattcaaaaaatacaattataaagaatttcaggacagtggtaacaaagcattaaaccaaacactgagtccttctgaaaatgggactctgggccactgcatatgtcacatcccctggaaaccagccctgcacggaatcttagctttgcacacgaacctaagtctctgcacccacctgcatgctgtagtttatcagggacgtagagagctgggccctgggcgctgtgaaggggccctattgcacagggactcagcactttgaaacccactctgctgtcttgacctttctagtgtcctcggcctacatgtaaaataagaatgtaatagtacctttcttttaggggtgttaggaggatcaaacaaagtaatgtacaaaaagcacgtgatgcctagcatacagttgtcactttgccagtattggctgcccttggagggcttggtgacgtgacttctgaagccttcccatggtggagttgctgcaacaacctttgtccactcctaatgggtacgaaattcatgtctgcagtactcgaatgaccctgatgggtgtcattgatagatggctattagcctcccctccaaatagcggctgtactcccagccaggaccaccagctctcaagggcttgttttgtccgctgatgtccatttgacaccttgctcttaacaggaaggactcaaacatttattataattacatagacaggaaaaaaaacatgattgctgtgatcacagagagtcatcagtatgattcaactaaactgaatactggtgaaggagaggcttatttcaccaggatcctctgctggcctcaacgttgtggctgtttgtcagagataagcggatgtggccgtgctgctggcatttggcacagggagtggtggcgccagcgtgggctcatctccccaggcattaagctgcactaattgctttggaagcgaggctttttcctgggcagcagcatatgctgcgtgagtcgcttgaagcaaagataaagagccaccctcctcctttattgaggtttaataataaaatggaactgtcaccatttccaataaatggtttattttaattgagaaaaataatgagaactggccaccttttggtacacggctgttcagcgtctccctgacttgggcgatctggagccttctgttctgtagctgtgcccttgaggcactcgggtcctggggtcagtgaagtcagctacgtgtctctatccatttgagaaaacctggccctcgaaaggcaaaataattccttttccaaggtctattagattataaagttgcaacccaggaagtgggcatagaaagcgttggagatgtagtctgttttaattttcacatgttgaagacggtcctttcttttagtgaatatgaaatgaaagtctcacttttttttctgtcaccaaaattctttcagatgacttcttttttcgggtcccccagggagaagtcaacccagtaccaccaagtatcagagagaaatgaaggcacagataaggcagtgtcttactcaggcttgtagagagggcgaatgtcagaacaggaattggaaggaagtcctgcctgctgttctgaggcactgatgctctcactaccccacccactactcaggtgctttcccatcctcatttcacagcaggcaaaattgaagccagagaactaaagccacttgtctcaggggttcagttggtaaatggtataaccagcactggaactcagtctcctgacccccagttcagttttttgtttgtttgtttgttttgaaatggagtctcgctctttcgcccaggctggagtgcagtggtgcaatctcagctcactgcaagctctgcctcccgggttcacgccattcttctgcctcagcctcccgagtagctgggactacaggcgcccgccaccacgtctggctaattttttgtattgttagtagagatggggtttcaccatgttagccaggacggttgcgatctcctgacctcgtgatctgcctgccttggcctcccaaaatgctgggattacaggcatgagccactgcacctggccagtttttggttttttttttttttaaatcagagttcatagggcctgtataccaattgcctccacacaataacaatgatatgatggcattaaacataacaatttctggatcttacaacgaccacaactgggagtagagaaaaataaatctgtagtgatgcagaggatgcagggcagtcagccagccccttcctttgcttccagacactacccttggggtgtacatggttaggattgatcatcagcaaaatcacaaatcctccgtgccatgggtcgtcaaagcactggctgttaaagcctcgagcaccaaaagcctgctgtgtataaagtgctgtattcagtctagcacaggcgcggtaaaccgatcgcaccatacgatggctgtgattaagaaggggaggaggggcataggggagaagaggaagatcattttaatgcaggggaagctttcacgaggtatggtctccgcagccagggtcattggtttggttgtggtaatcataagggatcttttcaattaagtggcccacatcagctaaaactggttaagcagaggagcaaaggtattggttcacttacctaaaaggccaggcatgcccggatctaggggctcaagccttgttgtccccatcctgtcctggctcctccatgtgggctttgctctctgcggctgttaccttcattcaggtgtgcacctcccgtgcggtggcaggatgattgctggcagccctaggcttcctctcagcaatcctcatggaaagagagagtccttcctcccacgtgccagcagaagtccagggattggctcaatgcccgtgcacaactgtggcccttggggtggaattcatagactagacaggtctgataaatggtcccactccttaatctgggagggagggagagagacattagcttcactcaaatcatatgaattatgggttggtgggagaaggaaaatcagaagaaggggacttgatgctgggcaggcaaaactcacacatgtccctgggtccaggtcttagaccttcctctgactcaccattagtccatggcttgataggaaggaaggtccattttaacccctgtctctgggtcagtgctgtccagttgcacttcctgcaatgatggcgatgttcattaattggcagtgtccagtgcagtagccactagccacatgtggctaatgagcacttgaaatgaggttagcactactgaggaactgtatttttaatgttaggtaattttattaataattacatttaaatgtaaattctacatgtggctcaaggctacctaactggacagagcagctcttagtggaggacacatcatgggaggtagttccctgggagacaagagctggttttgtgtaggagagttgggcagagggctaaatgaagctccaaagaccaggagggtgatctgggtcagggtgtggaggaggagaagagggagttggacatgagagagagagaggagggagaaacaaacacagagagtcctttattggtggcatcatttgggagtccttaacttgagaagatagtttttctgtctaacatatggaccagatatgtaccaggaagaaacaaaatcacaactgaccttgttataaaagcgaattaaagggaactccataacatgttgttacatttgatctaaatgtccaactgtaaaaaagcaaccattgcctgaagtgccacatgagctacacagagatgaaaagaaaaattaaatgttgtgcaggttgtttaaaaaaatgctctgtaggctgggcccggtggctcatgcctgtaatcccagcactttgggaggctgaggcgggtggatcatgaggtcaggagatcgagaccatcctggctaacacggtgaaaccccgtctctattaaaaatacaaaaaattagccaggcgtggtggcgggcgcctgtagtcccagctactctggaggctgaggcaggagaatggcgtgaacccgggaggcggagcttctggtgagccgagatcgcacccactgcactccagcctgggcgacagagcgagactactccgtctcaagaaaaaaaagaaaaaaatgctgtgttaacatgtgtgactgagtgcaattaaggcatttggcagaaatgacatcaggcaaatagaatgaacttgtaaaggcagagtctggccacagctttgtgaatctagggctggttaatgaccagcctctcagtgagctgtgtgatgggtgtttcatcatgctccgtgtccctaggtgggtgcaggagggtgtggggaccaccatgtgttgacactttcagagcctaagtcctcatggtggtcacaagcctgatttccaccgggggtggttgttggtgaaggcagactcccttcctgcccaactacagctgggacgcctggcttccttggactcggttaattgcctggatttgttcaccaggcattcctggaggacctgccatgcacttggcatcctgatgggccttgagaactgggcagaaagaaaagagaggcacaaagcttggctcctggccctgagactgcctagttccctggccctcagcattcctctcccccatcactcaagccatttgatcatcccctgaagacttagctcccacccaggagcagagattaaagtgagcattctggagccagactgctcaggtatatgtcaagcccatggcaagtgcctggcatacaaggtgctcaaaaagaaaaaaaaatattattttgctaatttagagaaacaacaggtatatagcagaaagaagaagggcattagagtaggtgtagctgacctggattgaaacctgggccaggcaactaggtggtgtgtgtatttggacacagttctcagtctatctgtaaagtgggatgatggaacctcacatgattgtcatgaagactcagttgcactgtattttttaagggcctaacaccaggcaggcttcaataatggtggctgctctgatgggccagagggcaaggaaggttgctatgacagtggagcgggccagggaagagggtcttgtgggttgtatatgtgcccaaggtgagccaccagttttaaattcagcctcgattcatgttaggcccaggtgtcattcaaaggtttttaccatgaagaacccacccaaactttggcgttcacactggcaccatcttgccagcaaatcttctgcccagctcaatgactgggggctcctactgcttctgaggggacccaaggagaggcagagcagcatcttaaaacaatcagcatgccctaagatttgtctctacgatccattttgattccgtgatcattttgggggtcctaagcagtgtggccaattagacacatcatgaatgggtttcaccatctgagtgctgatggcatgcctggggcgttgttgggtgttagggcgtggtaagagaaagaaagccactccttagcaaggaaatcatgggtggatattttccatgagctcattcttcctgttcctctccctcctggtgactccccctgccagtttccccagcggacaaaagtggggatgcctttggggagaaaataatccatttcaatagaaaaagcaaggggagtctcacgataactgcgcaggcgcggaccagagagctcttttctgaggatccggcaagatggcagaagtagagcagaagaagcagaccttccgcaggttcacctaccgtggcgtggacctggaccagctgctggacatgtcctacaagcggctgatgccgctgtacagtgcgcgccagcagcggcggctgaaccggggcctgcggcggaagcagcactccctgctgaagtgcctgcgcaaggccaagaaggaggcgctgcccatggagaagccggaagtggtgaagacgcacctgcgtgacgtgatcatcctgcccgagatggtgggcagcatggtgggcgtctacaacggcaagaccttcaaccaggtggagatcaagcccgagatgatcgaccactacctgggcgagttctccatcacctacaagcccataaagcacggcgggcccggcatcggggccagccactcctcccgcttcatccctctcaagcagtggctcagctaataaaggcgcacatggttccagtcaaaaaaaaaaaaaaaaaaaaaaaaagaaagaaaaagaaaggggttcggaatgcagtgactggaaagcaaagcgaggccgtggtgccaccatgggtgtgggcttttgggtcactcatacatgcatgtgttcctggacatgcattgtgtgcactgacctgttcctgggcatgagcctgaattcgctcttgcccctttgttgggaagcagaaacgtgtggggtttcgcagttactttctttagtcccctttaatctctagctaatgctgagcttctgcagagccagaagggtcttagggcctactctggaagagcctcactcccattctccttattccctggagctcttctggatttctagcctgtgtctgtcttgttataatcacagttttcatgttgtgatccagtctttatccttgctccttagagctatctactgagccccttctgtgtgtattacgcatgtggtagacatgaagacagagtaatgccgtatcttaagaaatgtcacagtcttaggtggggacagagtttaattatgcagtgctcagtgaaaggtggatctgagtacctgatggcagcatggagtcacaaaggaagcattctaggctagtcttagaggctggtgctctgagaatacgtcatgcggtgggaagagggttatgcccatatgagatgtgaaaagtgggtgggagagggcgtggcaggagagccagggaatggattgagagtgggttcccagtggaggggtgcatatgcagagtcctaaatgtgatcaggagcgggagagtaggggtaggagaggaaaagagtcaccaatgatgaaacgggagaggaaagtggcaattttagatgaattaaatgcttttcaccagagttcaactgattttcttcctaaactgtaactgaagctaaaccatgaatattgaaggtaagttttacattgagtaagttcttatgttttgaatgtagaaggaaaaagtaaattatgaccggttggatctgacaatcattggtcttgccatggcgtacatctaattcattcaaggttggtgtttcacataacaggacagacactaatggattttctgctttgctgtttcagcacttcagggagcatctggacaaacttttcgccaaaggaattggaatgttggatatagctctgaatgaggccttcaacattctgagtgatgtaagttcctctttgatttgcctttctcatcccttggagaatagatgggtgttgttttagaaaattgtgggccaggctgggcgctgtggttcagacctttaatcccagccctttgggaggccgagatgggcggatcatgaggtcaggagatccagaccatcctggctaacacggtgaaaccccatctctactaaaaatacaaaaaattagccaggcatggtggcgggtgcctgtagtcccagctactcgggaggtggaggcaggagaatggtgttaacccgggaggtggagcttgaagtgagccgagattgtgcactccagcctgggtgacagagcgagactccgtctcaaaaaaaaatagaaaaagaaaaaaattgtgggccagctctggctgacactgagcagatctataggcatgggacgggagagtgagactggctggccatttaagtcatctagggaaccagatgccagccagtgaggtcaaaccagagcacagtggggaagagagaatgctagggaatgagaccatggaagcagcaggagccaaattgagtagcgtcatagagacactaatgagggctttgactgtggagtggaaagccattggagggtctaggcagagaactacatggtcttgaactcaacagcatttttctggctgctgtatttagaagcaaccctaggagggcaaggacaataacagggaggccattaagttatctgggtaagataatggtgacttggactagggagatagcagtgaagatgttaagaagcagaaaaataaaaaccactctaggtattttaaatagtaggagtttaattcgggcaattgatggcataagggatggaaaagctgagaaaccagagaatgaagcaatccacagattagcatcagcaggaggcatctcctctctagggcagggggtacaacaggcaggaggggtgacatcagcgccgagtcactgtggccattcagatgggccattcagaagtgtggaggaggctacccaagaagaactgtgactatggagggaaggacctgtcctgtggaagttggaactatggaggagacacagtcacggccagaaaatgcctatcccctgagagcgtagagaaattgcttagaaagaccttgattctttccttgcttcctttcccctttgtatgatccttgtcaaactgttggggagcttgagagctgtggtttgcaggaagaaggcatgggatagtctgagaacaaacaggcactaaatggagcaacatcatcttgaggtgtcaagcaggagctgggagaccagcagagactcccaaggccttgctgctgttggtctgcaggcagctctgtagggcaggctgttgtcattttgcaggtgagcaagcagaagcccaggcaggtgagtcattcactccacagttcataacttggattgtgggttagttacacctgactccaaaacttgactttttactactcagctatactggcctctcaagaaaggctaggccctaatttccagactctcttttaccaataatacctgttgccacgaagatgactgtttagatctcagtcctgagccagtgtcatgactgcagaggagaagagaaaaataaggagagaaggtgccaagtcaacttcctcagtacaaatccaaagccccggtcacctaatgagctccaaggggctgttggctacaggatgtaaacatttatgtaagagtccgtgttttggacagtacatctctgttgacagcaaagtaatagttttagtgacacagccggcgaggacagaggactaggctgctgggcaggtgccttcttagggcttgggtctctgcatctcagcaggctctttccaggtggtgatattgaaaagacctgttacagtttgaaaattccctctcgttttatctcaaaaacctagtggccagagcagggggagacttctctgagctgtggagtcccttgtttggaagtcttccctgcagtgaatttctctttccctgttctctggcctaagtggcgaaggagaaagggttaggagattgttgtatggttaagtctgtggcccctggagtaaggcagattggggctgagaagcctgactcagccagagtttacagggtttcttgttcacagttattgagaattttaaggtaatggtagcaaagccttgaaccaagtgcggagctttcttagtgtaatcttgtgcagctgtgcatgtcacacacccgtgaggtggtcctggtggtccctttctcgtggggttgagattcagcctgatgaggcaggacctggctccctttcagcagtgctgggctgggtgagaagtgccacctctgtgaccactgagaacccaggtctctagacacagctcccactacaaatgctttggttctctttgcccaagtcattaggagtgtctgctccccttcctctattttctgttcctttccctggtaccctttctctgtccatcccttccatctgtcacctttgttctcagaccctcctaagacactatttcccatagcatgcgcagtttaatgccggcctgccaaggtactcccacatgggggttgtggtcaaggtgaggagatgccatcctcctcttgcagactcacaaggtacttgcgcatatcaaaggccttgagaagtcctgcagtgaacaaacctttaaaaatgtgtttaaccacacttactaacccaggaacactttatatcataccatcatctccgtattagcatcttgtagaagttacagctcaccaaccacattttggggcataatattgtatgctccaagaaggtgtattcacactttcacagggcctactaagacccagagaaatcaccaacacatggtggacttttttatcctgaatctttgtgagggaagcatttttgaacaggaaaaccctccatacccctgtaaaaatacctctggagtctggtcagtcagataaccacatgagctgaatatagatcttggaaagcaaaaagccgaataaatgttttttaaaaaaacacaatgataggccaggcacggtggctcacacctgtaatcccagcactttgggagggcgaggtgggcggatcaccagaggtccggggttcgagaccagcctgaccaacatggtgaaatcccgtctctactaaaaatacagaaaaattagtcaggcatggtggtaggcgcctgtaatcccagctattcgggaggctgaggcaggagaatcgcttgaacccaggagggagaggatgcagtgagctgagattgcaccactgcacttcagcctgggtgacagagcgagactccatcaaacacacacacacacacacacacacacacacacaaagataaatgttacaaaatgtcccagcttgagattggttggcgattaacactatatttgtttgagtgcacatttatctcatagggagaaacatttcatatcatctattgccagtgagcttttaaatagctaaactctttgacaaacacagaggtggttaatctcccatgaaaatgaagctttgtctattaatattttctacttcatcaatatgacctttaagtgatattattatcttcctgtgtattatgcctgcctttacaagtcaatatgaaataaaaagttatttcttgaacacacacatatacacgcacacacacacgtgcttaaaattgtgatcgtggctggagcttagaatggttcagaggttactataattgaatggagtttattctgttttacagttacctgcatttcagttttggtatttgctcagatgacttaaaggcttgcagttcttgatacaaatggctttgaaaggagcattcaaataaacttctaagccccttcaagctcttgatctctgctgcattcattagattctgtaagaacacagagcaagtttgctacagtagttagcatctaccttgtcatgtgacaactgcaattatcatttttggcgatgaatgtgatctttgcagtgattaccttttaaaattttttcttagccaattaaataaaattcggtgacatttcaaagactgttaatcacaaccaaatgctctaaatgtcaggatgcattgaaaatttcactgctaactgatgaatcactgagctaattgtagttcatcatcaggcccttgtcattgttattattatggaaaacactttcatcactctcgctattcaataaagaaaagttttagacaaatatgaagagaaaagatattactcatcaaaccatttgaatttaattgcattcttcaaaattctacagctacagattgcagcagagaataccagggactcagccagagaagaaagtactgtttttaaataaacagctcctggcagctctttattctagtccacattattcagatatcttcttttttcctctctttctttccatgtgtttgggaaaatttttccaggatgttttcagatgagtttgtgaacaatggccctagagtattctgtttttttccccttgaagcttctgtgacctgaagcatagattacttttatgcattggcttgttgctgagtttattcaatggtgcgaagctgtgtttaatgcagtctccccagaacatctccagaacaacctgttgagaagaccagggtacaaggctgttttttcttctgcagtaaggacagagtcttagcagcttcccagagttggaaggacaatgtccagatatttattgagacttaagtttggttgaagatggaccctttaatgggagatgagggagggggcttggctaggatcaggtaagaatcctaatatttctgttgaggttggtgaacatagcaagggaaagattttgaggtcaggggttcagtcttagggtgtaaattgtcctttgatgctttctattgaagaattgatgggtctttcaagaagttcctggaataagcaatgaggttatttccgagtttgaccttcctgggcaagcattttctggaatagtaagttatattgataaagacagtagaatagtggtcgcgtggaaagctttgtggtgtgatagcggagtttccaggtgtttctacctactaacgtgacagtgtcaggggctgcgtctgctcattaactcagttgcacatgtgcagtcggagttgcaggagtggctgccagggccaggactaagatgaggaaagtgtctggggcaccacatgtaaggagcactcaccctcaggatcacagccctggtgactgccctgtgaccctgaaaccctaaaagggatggaggaagtagaggcaggaggaggagattaatacttttggagccctaccacctatccatttgcttactgatcttcctgaattactgaaaggccatattgtgtgctcaattggagagtagattctagagcttgatggtctggattcaaatcccagctatgtcagatagtagctgtgtgacctggggcaagttagctaatctctctgtgccttagtttcctacctgtaaaataaagataatgatagcgttggaagacttttccttagctcagctaaagacaggatcctcgtcacatggccacgaaagtttaggcttgcagaagtttgaagagtaagaaaaatcggatttattgggcaaaaagggaaaaaagggaaacaggtactagtcctgctagtacatgcttcttcccacctcacagattgaattccaggttcctcacaggaagaggagggaccaggctcctccccactgcaaacgacacaaacttctatggctccatcccagtgcacattcctcccagtgtacaggctggttggagttttgccaaggagtccttcccacctggctgtctcagtagtacctacctcagaggcctgtaaggattaagtaaattcgtattaatacacgtagcctggcatataacaaacattgaacatttaacctgtggtgtaccaaccacttaaggatgttattcttatcttgtctgtggaagaatgaaagctccggaaggaaacttatcccaggcacacagctgtgttgctgagatgacatcgagtgctttcccctatgccatggtaccccgtgcgtgattcgagttggctttgctgtgtctcagtatggccataaggcaattccattcatccatttatctatctatgcatctatccagttatgtatggtcttctctcaagttactgcaacttcagactccacatcagatgtctaagtgcctgaagactaggcattaatatctttaatttgaatgctttattacgtctctcattcaccagtggccagccagcaaagccaagagtagccaccatccctccccagtgtcatggttcaatagattgaacctgccaggcacactcccactcagtgcctttgcacttaacgtttgcccttcctggaatatctttccctcagatactcacatctctcaggtataactcaaatgtcaccttctcagtgaggtcttccctgactatggtttctagaattgccccctcccatttcttatccttctttgctttcttctttccccacccttaacatcaccattatcaaacatataacgtagtttacttatttaccttgtttttgtatgtcttccctttcatgcgcgtctgtgtgaagagaccaccaaacaggctttgtgtgagcaacaaggctgtttatttcacctgggtgcaggcgggctgagtcggaaaagagagtcagcgaagggagataagggtggggccgttttataggatttgggtaggtaaaggaaaattacagtcaaagggggtttgttctctggcgggtaggagcgggggtcgcaaggtgctcagtgggggtgctttttgagccaggatgagccaggaaaaggactttcacaaggtaatgtcatcagttaaggcaaggactggccatttacacttcttttgtggtggaatgtcatcagttaaggtggggcagggcatattcacttcttttgtgattctttagttacttcaggccatctgggcatatacatgcaggtcacaggggatgcaatggcttggcttgggctcagaggcctgacattcctgccttcttaataagaaaaataaaacaagatagtgttgaagtgttggggcggggaaaatttttgtggagtggtatggagagagagtggacgatgtttctcagggctgcttcaagcgggattaggggcggtgtgggaacctagagtcggagagattaagctgaaaggagatcttatggtaaggggtgatattgtggggttgttagaagaaacatttgttgtatagaatgattggtgatggcctggatacggttttgtatgaactgaaaaactaaatggaataagaaggagaaaaacaggtataaaaggtctaagaattgggaggacctagggcatctgattagagagtgcctaaggaaattcagcatagtcctgccagcaaagattatttatttacttcaagagttaagagtggcggtttggggatagcaccaggagatatcagctatgatggcttggagaaacagtgtaaaccggcagtgtaaacaagagcagggcatgtatgagtagttgagaatggaaaataggagtatgactagacagaaaatagtagggatgacaagtttttttgggggcacagtctaagttggtccggtgtctggaatgagactggggcctaataaaaaggagcatctatacaggagcttaaatgggctgtaccttgtagcattccgaggacaggcctgaattctgagaagggaaagtgataaaagtattgtccagtcctttttggtggctgagcttggtgaggtgtgtttttaaaagaccttcagtccattctacctttcttgaagatggaggactgtaagggatataaaggtttcactgaatactaagagcctgaaaaactgcttggctgatttgactaataaagactcatctgttatcagactgtattgaggtgggaaggctaaaatgaggaattatgtctgacagaacggaagaaatgactggtggccttctcagaccctgtaggaaacgcctttacttattcagtgaaagtgtctatttagactaagaggtattttagtttcctgactcgggcatgttaagtaaagctaatttgccagtcctgggtgggggcaaatccctgagcttgatgtgtagggaagggagggggcctgaataatccctgaggagtagtagaatagcagatggaacactgagaagttatttccttgaggatagatttccacgatggaaaggaaatgagaggttctgagaggcaggctagtggctagtactatagcatagcctgcctttgctggtatgtggcgattaggcctggtggaactaccatcaataaatcaagcgtgatcagggtgaggaacaggaaagaaggaaatatgggaaaatggggtgaatatcaggtggatcagagagacacagtcgtgggggtcaggtgtggtatcaagaataatgtgggaggccggattgaagtccgggccaggaacaatggtaattgtgggacttaacaaagagtgagtacagctgaaggagccagggagcagaaagcatatgcgtcaggtatgaggaagaaaatagattttggaagttatgagaaatgtagagagtgagttgagcatagtttgtgatttttagggcctctaaaagtattaaagcagcggcagcctctgcacgcagacatgagggctaggctaaaacagtaaggtcaagttgtttggacagaaaggctacagggtgtggtcctggctcttgtgtaagaattctgactgcactataaccatgcctaggaaggaaaggagttgttgttttgtaagggattgaggtttgggagattaatcggacacgatcagcagggaaagcacgtgtgtttttatgagaattatgccgagataggtaacagatgaggatgaaatttgggcttgactgaagtaatgggggctgtctgtgaagccttgtggcagtacagcccaggtaatttgctgagcctaatcagtgtcagggtgagtctaagtgaaagcaaagagaggctgggatgaagggtgcaaaggaatagtaaagaaagcatgtttgagttctagaacagactaatgggtagtagagggaggtattgaggataggagagtatacgggtttggcaccacggggtggataggcaaaacaatttggttgataaggcacagatcctgaactaacttgtaaggcttgtccggttttaggacaggtaaaatgggggaattgtaaggggagtttataggctttaaaaggccatgctgtagcagacgagtgataacaggctttaacctttttaaagtgtgctgcgggatgggatattggcgttgagtagggtaagggtgattaggttttaatgagatggtaaggggtgcatgatcggtcaccaaggagggagtagacgtatcttatacttgtgggttaaggtggggggatacaagaggaggacgcaaaggaggcttttgattgggaagaagggcggcaatgagatatagctgtagtccaggaatagtcagggaagcagacaatttagttaaagtgtctcagcctaataagggaactgggcaggtggggataactaaaaaggagtgctttaaagagtattgtctaagttggcaccagagttggggagttttaagaggtttagaagcctggctgtcaatactcacaacagttatggaggcaagggaaacagacccttgaaaagaaggtaatgtggagtgggtagcctccgtattgattaagaaggggacggacttaccctccactgtgagttacctaaagctcggcgtccatgatggtctgcggggcttctgaggcgatcaggcagcgtcagtcttcagccagtaagccaagaaggagtcagtcagagaaccttgggccagagttccaggagctctgggagtggctgccaggtgagttgaacagtccgattttcagtggggtcccacacagatgggacgcggcttaggaggaatcccgggctgcgggcgttccttggcccagtggccagatttccggcatgtgtagcaagttcctgggggaggaggttctggagaaacgtctggctgctacagttcaggcgtttggaagttcttgtgtgctggagatgtggctggggtttgtctcacagtggaggcaaggaattgcaacttttttctgttatttcacaccttgaaggtgaggttaattaagtcctgttgtggggtttgagggccagattccagtttttggagttttatttaatgtcgggagcagattgggtaataaaatgtatattgagaataagatggccttttgaccttttaggggctagggctgtaaagtgtcttagggttgctgccaaacgagccatgaactgggctagatttttatatttgatgaaaaagagcctaaacactatctgatttgggataaagaaaaaggagcattaaccttgactatgcgtttagctccagccacctttttaagaataaattgctgggcaggtcggggagggctagtcacggaatgaaactgtaagccggagcaggtgtgaggaggggaggtgataaaaagattatagggtggaggagcagaggctgaggaagaattgggacctagctcggcctggcaaggagcagcctggggaggaagggagaggtcagatgggtctgtagaaaaggaagattagaaagactcagtgacgcttggggttggtactgaggggacaggcgggagggaaagaaggaagatttgggacgagttgcactgggcacagagactaggaagggactgatgtgtaaaagaatgcctggacgtcaggcacctcacaccatttgcccattttacgccaagaattatttagatcttgtagggtggaaaaattgaaagtgccattttctggctatttggaactactgttgagtttgtattggggtcaagtggcattgcagaagaaaataagacgcttagattttaggtcaggtgagaattgaagagattttaagttcttaagaatacatgctaagggagaagaaaggaatggaaggtggaagcttgcccatagtgaaggaggcaagcccagagaaaagagtagagacacggagaaggggtgggggtttcttcccctccagaaaagcagagaaagggttggggcgcggaaataagggattggggcgcagagataagagattggggcgtggaaataagggattggggcacagagataagaggttggggcgtgaaaataagcgattggggggttcttgccccctaggaaagcgggacttgctgctaagggtgaaggagaaggggttgaggggtacttgcccctgccccagaaaagcgggacttgccgctaagggtgaaggagaaggggttgaggggtacttgcccctgccccaggaaagcgggacttgccgctaagggtgaaggaccaaggcaggcatccctgcgtggtctgaaacgtgaaatcagagaggcgtccctgcaatgattaaacaccaagggaagactgccttcccagtccgtgaccggcgccggagttttgggttcacggataaaacatgtctcttttgtctctaccagagaatgaaaggaattgaaattaagagaagggagagattgaagtgtggcgccaagattgaaaggagaaagaggttgagggatagtgagggaggttggagaacagagtaaaaagaggccgcttaccggatttgaaattggtgagatgtttcttgggctggttggtctgaggacctgaggtcgtaggtggatctttctcacggagcaaagagcaggaggacaggggattgatctcccaagggaggtcccccgatccgagtcacggcaccaaatttcatgcgcgtccgtgtgaagagaccaccaaacaggctttgtgtgagcaacgaggctgtttatttcacctgggtgcaggcgggctgagtccgaaaagagagtcagcgaagggagataagggtggggccgttttataggatttggttaggtaaaggaaaattacagtcaaagggggtttgttctctggcgggtaggagcggggggtcgcaaggtgctcagtgggggtgctttttgagccaggatgagccaggaaaaggactttcacaaggtaatgtcatcagttaaggcaaggactggccatttacacttcttttgtggtggaatgtcatcagttaaggtggggcagggcatattcacttcttttgtgattcttcagttacttcaggccatctgggcgtgtacgtgcatgtcataggggatgcgatggcttggcttgggctcagaggcctgacattcccaaagagaatacgaagctaagtgagggaagagatttttttatgtttcattcctagtgctgtgtgggcacttagcaaataattttagaacaaatgaatacactttgcagattttaatagagaaggtttttacttactgaaggttgaagattttgtatgtgtttcccatctcgcagcattgacatgtaattgtagggattttaaaggacatggtattactttcaattgcatcattaatagcattaattaagggaatttttcaccccgattccagggaaggacattctgctctggcaaccatattcagtcactctagctgcctaccactcacaaaggctgagagctgctaaaatcttacataaagctgaaagttgaagaagtctagggttttacataccagtgagcgcaatcttagaacttcagcatgccatacatgctaacgtataaactaatatgtaagtttacatgccaacaatataaatttgaaatgaacccttattaagaaaatacttgggcttctcaagtgaattgtcatgttactgactttctccctatatgcctaaaacctccttgattttattatatgctgcattctgtactcatcagatccacccgaactagcctcatttagattttgaaagagatattgtctctcaagtagcccattgtttgtataatgtgttcctaaaacatttctgtgccaactcctttgggcttatttcctaaaacacagtccatacctgaaggtaagagaggttgtgcaatcctagactcttccttcccacctcttgtgtattttttgaaatccccctgtgatctgtatttggatctattggaaaaaaaaaaaaaagccaagctcgatgaagtatttaaagatatttattctgagccaaatatgaatgactgtgtcctggggtgcagcctcaaggggtcctgagagcatatgcctaagttgtggtcatgttacagcttggttttatacatttaagggagactgaagttacaggcaaagacataatacatgtaaggtatacattggtttagcctggaaaggcaagacatttcaaagggataggggacacttacaggtcacaggtggattcaaagatttctgactggcagttggttgaaagaattaagctttgcatgaagagttgaagtcagcagaaagaaatccttgagttaagaggggtgtggaagccagggttttgttatgtagatgaagcctctaagtggcaggcttcagagagaatagatggcaaatatctcttttcagacctgaaaagatgtcaaagtcttagttgaatctctcctggattaggaaaagacctagaaagggaaggaaattctctagcgaatgcaaatatcccccacaggagaagactttatatgaccatttccaaataaataaatatattttggagtaaaataccttgatttccttcagggcctactatctgcctttcagtgctatgccagagtcaggttggaattttgtatattattgctacaaagagtctgttttgtcagtcttatgattgtggttttaacattagtgctgatcagttctcccaaaactccaaagggagggggtataaccaggtatgtctgacccttcccccacttcctggcatggcctgaagtactttttcagatttctttgggattcccttggccaacagtaaggtctgttcggttggttggagggcttagaattttatttttggcttaaagatccaatttgtcagagcaaatgtggtgatctgtgtggaaagactttttgtataggttgttttggtggtggacagtgtgctgtcattttaaaaggcttccttagtcccaggtctcatgtctctgatttttcactgatacacagaattctctgatatgtatactattttgaacttatttctttccctagttcaaccacacgggacaaggaagtatctgcagtcaggccatcatgctcataactgatggggcggtggacacctatgatacaatctttgcaaaatacaattggccagatcgaaaggtaagttgatgctgatcccgtctgtgcggtggactccttgagaatctttactgtaatctccagcttgtccatgagtaagtgcctcatgtagacttaatctcataatgatctgtggtttctcagccttgtgttttttggttgaccaaaactgaagaccggcttttcttgttttcaaaaaatgaaacttttggaggagagaagaaacttgtaaagacatagtggacgtattctgtgaaaagattcattgtgaagtgtgcttcatccatattgggttgtgcttttctttatttttatttgcccttgaggcagagctgcatgttgggcccagcatctatacaatggtgaaatcagtcatggtagccctgcaggcctctcctttacatattgtgtttgtatagttcctcccacggcccccattaccacccagaaacttctctctatctcccactgctgttcttcaccattgtcagaacttgtctgttctctattctgatcctgcctttgctttccacgttgacagttattaaccttttgaggccattgtgaggttattaattgactgatactaatatttttggtgtattctgagtgcctgaactcagaggtttctcaagctgttatcttgcctgagttccctggggagatctttaaaattatgtgtatcctaccccacccctccagcagcaaaatctctggggatgtggttcagtaatccatgtttttaacaagtttctcagtgggcaccagccagtagactgacaattggtggtcactgtctcacctaaatggtggaattttagcagggaaaagacatcaaagtgggtgctcttctgggggtatcacaaaggtgtttttctactgcatgtgccagtagtgttatcctgactgtctataggtacacgagtcagtccaggccaagtccttactgctttatctgttttgcatacttaatttctgggaattaaacacactggtaaaaagaaacgggagacaaatgacagctgtgtcctcaactctatctagggagcacatactctgaacatgagatgggaggtgtctttctatattcccttagtcactgttggtccacacctatcactgccatctcacctcaccaagtgtgagcctggtctttaagactacgtacattttgtgcaacatggtccccaaatgggtgccaactccttcccctgctatccagtcttgaaaagagccatcacctctgaagctggagaaaaagctggcggtgctgagctgactatgtgggattctgagatgtctcctgcccagaggatatccaggaataaatttgatcaaccataaacactgagttcagtccaacccttgaagtagatggaggttcactcttagacagggttatattagatgtcagcagtagttcatgtggtaacttccagagacaggtagaggccagaattagttcataataaacatacatgatgtgaaaggaggagactgcttgacacagttgcacctctgtagcacacggcccagtgctgagcgtctggcagggcctaatgcacagccctgccaggtggctgagtgactgagggtgctaagagggaggctccagtataagtaaacatgagtagggccatggacattttgcagccaaatagaatgttcacagatgtcatgacatctcaaatgatggtgaaggatattttgcattatttagagccatttataaaagcagaagaaagtgaaggggagttttaataagcagctctatgaacagcaagtgttttttcatgtgagtctcacatgttgtatcacatgaatctttcccacttggtgacattcaatgaatagcatttacccaagaatattgatatttaaatgccctgtccttacttgtagaggcataggatgagggctgcaaagtcctaattctccagacaaaacacaaatttcagtgtatctttccaaatgaatagtattcattttaggccagatgcgttcttggattaattgaaaccagaattctggaaatttcaacattacttaaagcagtttcatctacttatcaagtattatcaagcagaagtggattttctttctgtagcaaaagggtcttcttttatgattacaagttaactgcagtctttctttccctctgccctattctggagagttccacgacatttttatacatatacattctcttctttatgaacttccatgtgaaggtgcaggtaatcaactcgcataaaaaccgaatacgattcagcattgtgttaaagtgagatgatgagcaatgtctgagcagtcatctttctccattattttgaatgttagctattcagtagagagttgtgccatgttgtaattgacaatcttcaagattgtaaaaatgggaaatgggttcaggacagaaaaaaatgatctcaaggctggaatgtgattcccataaaacagtagttctcaaacttgagtgagcttcgggatcacccgagggcttgttcctctacaacttctgatgcagtagatctgagtgaggctgagagtttgcatttctaactagttcctgagtgctgcggaggctgctggtggggaaccacacttgtggaactactgccacaagaaatagcctgaagaatagggtttagatactctgcaggctttgccatattgctgccgtctattgacttttacaaggactcatttcctcagttgaattcactgcacaggtttgtgtttcttggttcatattctgtcttaaaaactgtcaattaccaatcaacattaaaagtcaagatatttgtattagtccattttcacactgctataaagaactgcctgagagtgggtaatttataaagaaaagaggtttaattgactcacaattgtgcatggctgggaggcctcaggaaacttacaatcatggcagaaggggaagcaggcacatcttacatggcggcaggtaagagagtgagtgaaggggaaagagcctcttatgaaaccattaaatctcatgagaactcattcactatcatgagaactgcatgggggagaccactcccataatccaatcacctcccaccaggtagctccctcaacatctggggattacaattcaagatgagatttgggtggggacacagagccaaaccatatcgttattctataaaattttagagttgtagtttctctcataataggttacacctggcagtttgggtccaacattcctatatgacaaggccgctgctggcgctgagcagcagctgtccccattaggcagcaaatgcatgcttcctttggacatgaccctcatcaccactcttcatttcctctcagcccacttcactcatatggtttccctcccacaggtgtggagttcctgaccactgctctaggggaacaggtacttgctgttccccagcctccggggatttgttcccttctcttaggtttgcccggagccttccctcttcttctccagccagaggccatttgtccttgcctgagccctaaactcaaaactccctaggaactgtcttaaggaagtatagctttgtgtccaatacaaatattgtttctggacctgtctttcatcttcattctttggtgagtccaagagagcaggttctctacttctgagcaatcctactgcctttcactatatcccatcctgccaagaagtgtggtgtagagggcctagggtacctgcctgagcccttccccctagtgtttatgtcctgtgtaatctctttaccttctgtgtgggcaggacctgtggcttgcttttaaccaatggaatctcgtataggtgaagggttttgtttcaagtcagttgatttttgagttaatcagaagggatatcctgggtgggcaggttttccttccttccttccttcctttcttccttccttccttccttccttccctccctccctccctccctccctccctccctccctccttccttgcttccttccttccttccttccttccttccttccttccttccttccttccttcctctctctctctcaatcttttaagttctgggatatatgtgcaggttgtgcaggttttttacataggtaaacatgtgccatggtggtttactgcacagatcattctgttacccaggtattaagcccagcatccattagctattcttcctgatgctctctcaccccacaaaggtgccccagtatgtgttgtttgcccccatgtgtccatgtgttctcatcatttaggtcccacttataagtgggaacatgtggtttggttttctgttcctgcattagtttgctgaggataatggcttccaactctaaccatgtccctccaaaggacatgatctttttcctttttatggctgcacagtggtatatgtggtatgtgtggtatatgtaccacattttctgtatccagtctatcactgatgggcatttaggtcaattccatgactttgctattgtaaatagtgctgcagtgaacatacacatgcatgttatctttataatagaatgatttatattcctttgggcatatacccagtaatgggattgctgggtcaaatggtatttctgcctctctagctccttgaggaataaccacacggtcttccacaatggttgaactaatttacactcctgggtgggccttatttaattgagaatcctggaaagagggactggaccctccacaagggcagagagactctccctgatggtgtgatgaagcctttatggccagaaactacaggcagccttgaatgtgagagtggcttccagctgacagccagaaaaaggctggaccctcagtcttacagcaaaaagaaatgaattctgccaacaatctaggtgagcttggaggcagattcttccccagtcaagcctgcagatgaaaacacagcccagttagcacctcgattgtagacttgtaggatcatgagcagaggacccagcttgtttgtgccccaactcctgacccacaaaaactgtgagataataataactgttctgttttaagccactacatttatgatcatttgttatgtagcagtagaaaactaacacaagaagcaaggagaagggagaaagggaaggaaattacttacctagcaatgctataaagcatccgcaagcctagtggcttaaaataacaataatttattatttcttgtgattctatgggttaactaggtggtggttctgtttcacatggtatcaggtggggtccctggtgaagctaggagcttgactgtctgcctcagttctcctctccatgggctttctctccacgtggtgtctcatcttccaaggcaaccctgtgtgtccactgtcctcagtacagtagcctggattaccttacagtgtagcagctgggttccaagaaagggaaagcagaaggaagttggggaacagaccagggggggcatttgtgagtgtcatttgtaaaagctgcctaccatccaacagggccttgctccaagcaactgcttaataaagcattttagagtgagttggaagaaggaatgcattattggtgattttaactgtgagcctatgaaggcagcatcatgattgcttatgcaatgtgtcccttgccagtatttcatttctgagagcagaaatgaggagctatttattcatttattggatgccatttacttttgcctaatatccattggttatgacttaacagcagctcttacacacttggaataaaatatgaactccaatatgagaggaactcattccaggacctgctcaggaaataaagctgcattcactttatgtagctgcttttccaagtgaactaaaaaaaaggaaaagtcatggaattatttatcattacctcccccttgttgcacaagacagagaagcaatggctggataggtaagaaaatgattagccaggttatttaaaggagaggttgacaaactgtggtccatgtgccaaatctggcccattgcctgcttttgcagcttatgagttacgaatgattttcacatttttaaatgttcaaagaaacagtatttcatggcatgagaacattatatagaattcaaatttcagtgtccacaagtaaggtattattttgacatagccacacccatttgtttactattgtctatggctgatggcagaattcagtagttgtgacaaagaccagatggcccgtgaagcctgaaaaatttactatcaagccctttaagaatatggtttcccaccactaatctaaaggaaccttttaaaaatttagaccaaccagcatattgctgaaagtcattgagataccctcagaatttcatggctctgctgaattcaacagaagatggtaatgacggtttttccctatttttccactgcttttttctacttgaatacatgattgtgttagtccattctgcgttagcataaaggaacacctgcggttgggtaatttataaagaaaagaggtgtatatggcacgtggatctgctggatgtacaagaaatatggtgccagcacctgctctgcttctgttgagggcctcatgctgtttccactaatggcagaaggtgaaggaggagcaggtatgtcacatggtgagagaggaggaggtaagagagagaaaaggggtagggccaggctgtttttagtgatcggctctcacatgaactattagaatgataactcagtcattaccatggggcagcaccaagccaatcatggaggatccaaccccatgacccaaacacctcccaccaggtcccacgtccaacattggtggtcaaattccaacatgagatttgtaggggcaaacatccaaactatatcagttacactagccagataataaatggtggagggctgggagacttgatgccgaatactccttttcatgctggagcttctcttaccaaaatgtttagcggccctttctccttttccctctctccttgcttcttcatcagtgctaccatcaagactgggatatcttacatggtaatggggttgcttagaggtagagtaggctgccaggctgcccagccttggcctggaatgttgaaatgtagggtctttataaatgctagacttgactgccccttgaacctggttttggtggtgacatggacacaggacagaatttcacagctttcaggtcactgtggtaacagggaacaaacaccctggagagaaattaggctccctctacagaggctcgggaaatcagagactccctatctcagtcagcttgcgctgctatgacaaaatatcaatgactgggtggcttataaacaacaggaatttattgctcacagtcctggaggctggaagtctgagatcagggtgccagcatggtacagttctttttgaggcccctcttttgggttgtaaactgctgccttctcttggtatcctcacctggcattgagtcaaatgaggaagcaagctctctcatgagtcttataaggacactaatcccattcatgagggctccacccttatgacctcatctaatcctaattacttcccaaaggccccaactcctaataccataacaatgcaggctaggatttcaacataagaatctttgggagacacattcagtccataacactgtctgttcctgtgggggcagagttgacctatccataaattaacaacccttattttgccttgtgttacactttagggagtgaggatttggcctgtaactgtcaaataacagagcccatcctaactgcttctactgtgggtaaaataatgacatactgcctaggtgtgcaggtggatggtgacccatctacacctgttagatgtcactgcatgaactgaccctcacctggttgtgttttgagccacagaagcagtactagaatgttctacttcgtcttcatttccctgaacctgaattttcctcagtgagctaatttttttttttagggtgatatttcaaacaattgtagggtagcttgtttttttgttttttgtttttgtttgtttgtttgagacggagtcttgctctgtcacccaggctggagtgcagtggtgtgatcttggctaactgcaacctccgcctcccgggttcaagtggttactcatgcctcagcctcccgagtagctaggattacagtcaggcaccaccacacctggctaattttctttatttttaaacagagtcttgctgtgttgcccaggctggagtgtagtggtgcatgttcttgactcactgcaacctccgcctcctgggttcaagtgattcttctgcctcagcctccccagtagctgggattacacgtgtgtgccaccacacccagctaatttttatattttttagtagagatgaggtttcaccatattagccaggctggtcttgaacttctgacgtcaagtgatccacctgcctcggcctcccaaagtgctacaattataggtgtgaactaccgtgccaggcctactttttgtattttttatagagctggggtttcaccttgttggccaggctggtttcgaactcctggcctcaagtgttctacctgcctcagtctcccaaagtgctgggattacaggcctgagccactgtgcctggccctcagtgagagaatgttttaaaccaatttcttataccccaatttataaaccaatactaatgatagctaattcctactgaatgctgagtgtcagagactgttctaaatgctccgtgtgtatctaattctcacagaaacctcatgagaagtatactatcgttatcccctttcacagttgaggaaactgaggcatgaagaggctacattcaggattccctgactagcatttggtggacctgaaatgaccactccagcactcaaatgctgagcctagacccttaaccaggatgcagacatcttgagaacaaaacaaggtaaaatgaccataggtcagaggaagagctgtccacactctatacattgtcatcgggacagtaagtccttttccttggcctcctgcccccaagtacaggagggtctgcagaatgtcaggaactcgttgatcttagattagaacccactggggctacagtcagagagcaggagaacagcaaattgtggggcctcaggatgaggctctctagatgtgattaaatgattttcctcttctaaaaggacaggagaacttcaagatgagtgcgatttccgtgctgtgtactgtgcgttttatcttcagttatctcgagaaaaaaaaaaaaaaaagcaaggatggtagctttgaggccatgtgagaggctcagggctgctggaggatccttggtagcctggtgaggactgcaaggagggcagaagcagctcttggtttgagggtaaagggatgcccttgatcatggaatggcttaggggacctggctcagggcacttttggaactctgttggaagtgactgtcctttgggctggtgtcacatgcatcttcgaggaggggctggcttggggattttgtgccccaagcctcccccgtgctataacttggaggataaagcctcaagccagccttgccccagtggcctccggggtgctgaaaggcttagctttaccgtggcgcctctgagggggttttgtaaagctcaggaatcccctcttctcctgatagttctgtggggcatgtgccattctgagggccagagttcctgagctgattcagggattattcttttaagaacccaacccttcactcatcttaagcaatttggaagggatgttttgttctttcttccccactaaactgcattgttctcttctctgactttaaaatcattttacaaagcattttctttgcctccctttgactggttgagaggagaagggatttgcccaactccacaggcaacttggaaaggcgttaagatcatactgtgcccagagaagcctcacaaaataaatgctccacccaccccctagcctccacacgaccgtcactctggctgtctgtattcttcatcccataggactggattaataagggatgttgaaggtggcaaacgttgctggcagcggaaaaaaagggaaggaggtagctgtcttagggtaatgcattcatgcaacaggtatttattgagggcccgctgtgtctcgcagtccattgtaatggagcccaggagtagggggctaagacacctccaatgagatcacatagagcagataacagatcacaggtaaccagcaaatgaaaagaccaaatcatttaatcataagtcttctgaacaagacaaacaagaacctgagacagagaatgggtaatggcagctctcctagacagggtggccaagacgagcctcttggaggagagcatgtgtgagggagaggagctgggtggggaaggcattcatggcagagggaacagtacttcagaagccctgggtaggaaaaggtggatgtgtatgaggagcaggaggaagtgcaggtggctggagcccagtggacatgggaacagggtgataggaaggctggcagcacaggcagcagccaacttctctgggcttcagtgggcacagtgagatgttgggatgtgatccaaggggttggtgaggagccatgggaggctttttttttttttttttgagaccgagtttcgctgtgtcacccgggctggagtgtagttgcgtaatcatggctcactgtaacctccgcctcctggattcaagtgattctcctgtctcagcctcccaagtagctgggatgataggcgcacaccaccacacccggctaatttttgtatttttagtagagatggggtttcatcatgttggtcaggctggtcttgaactcctgacctcaagtgatccacctgccttggtctcccaaagtgctgagattacaggcatgagccaccgtgccggacatatgggaggcttttgaatggagaggagtgaactgactgttttcagaagggctctctggcaactgtatagggaattgtcctaggagacatggacttgggctgcatgtaccgatggtattaactctcctcatcacacctgattaaaaagggtggggagtgtaggtagtagaccttttcacttctgtgaatgctccaagatgctcctatttctcactgctgtttcattccaggggtctcttgggtgctgacatttctctcttctctttttccctcctttcctctttctctttctttctccttccctggctgaagtcacatttggtccaaaagttttgagtgagtttgagtcattgctgtgtttcttcaagggtgataaatcctaaagctatctcaggaaaataggaacactcatttctcatggtcagtcaacagcatgacaggaaaaggcattttcagtcactggggtgagagctcacgcaggccctccctgcagctgaagggagagttgagatggttcattgtctctggtttaattacttctgctggtattagacatcttgtgactccagcaagaagaacatgacaagacaagttaggaacgaagccactgatgcacggctgctgccagccattgaaaaatcacttcatgtcaggggcccacgacagatgcatggtacttcccctgtggtggaaactgtggtttctcttcctgggtgtggcactggggccttgggctccatccaggtgctgcggacctcagaaagcaggtgggaggacagtgtacattctctccaggtgacctccaccatcctctagtaaatggctatctaggtagccactcttaagggaatcctctcctctgctggtgttggggaagagtcaaactgttaccttagttcactgtgtaatgcttagccccacccaatggggagcacttctagtagcattcttattttgcaggtgagagagctcagaggatttaagtcccttgccactgagcccacagcaatgaaactggaagtctccagtttcaacccatatccagctgtctccatatctactactcttaaattgtagcacattggagtcaccgaggggttggcagtggggggtcttgccaaaagtgattcgtgggctccattttctgcaggcagaaccccagaatctgtgttcataggtggctcatagatcatattttggggttttgagggggttagggtgccctccggggcttggcaaagagtgtttctgcaagccagagcatgtccagaagtgccactcagtgtggttgtattcccagtgaattggacaggaatcagggacaggcatctaccagttatttgaacagagagaatttaatgttaaaaattgcaaatctagtattgatgagatgaaaggacaaaagataactctaggttttcttggaagtagcaactgcaggcaacagccaccacctcaatagttcgtatgggaggaggggcagaggaaagaaagaggttactaaaatttagaagcttgggggagaagctctatcaggctgggacccggacctctggcaagggcatgccggcgggcaagtgctaaggtctctgagctcacaggagggtcctgtggggatgcgaatcagactttttaggagggagttctggggtctctgaaggagatgcaatgagactgattctgtgaatgctggcgagctaccacctaggttaatttactgctactggaatgagctgtccttgctggagtgaagaaaccctgctaggatgaaggcgttgggaatgagaatccaatgggaagcaaacaggaagatccctctccctcctccatggatgcaacatcctcctattgaccttattggccagaccaggcagaccctagccaggaatagctgacaaagcagaaacgtggtttgcagagccccagcgccagtcccaagctgggggcccagcctcacagagcccaatccaacgtgtgcttggtgctggacatgttagcttattggctggaatacccagtaatgactggaagcttgctgcatgaattctgtattatttgcaatctactgatatgtcaagttcttatttcctaggtttttatttctcttggactattgagtagggctcttgggggtgtgggtgggagcgcagtgctgcctaatggaaaaagggtagtgtctggatgctgacaactcaatttctccatctgtaaaatggggctaattatacatatctggcagtattattaagaattaaacaaaatgttgcgctcccaagctcagtgctgggcacacagcaggcacagtacacaatggctatatcattatcatcgttaccataattttcaaccactcgcattgttaaaatccgtctgctgtagttaaaacatagttgtactggatggatttggatgtgggaaatagaaagtgctcttttatcctgaatatggattaatcttgtgtgctgttgtggttgacttagaagaagattaaagtattctactgcatttccaaaacatacccaggtttttctttatcacctatttcacgaataaatatatgtgcattatccattttacctgaactcctggtatctatcaaaatatactgagaaatatttgaccagttggtatcattaattaatgataagtagtagctaatgttcatcaattcaaatgagatgagtttcaagaaacaagagcctgtctgtattagtgaaatataaaaaggaggtttgaaaagtagtgtcacttttatattatttgtccattttctagagtagtggtcaaggctcagactacctgggtgggtatctaggctttactgtttctgatctgagtgacttcaggcaagtgatttcctctccttgtgctgtggttccctcatttagaaaataggagacaagaaccatgtccccatcttgcagggttgtttttgggcagattagtagtgcccagtgtctactgagtccttgaggggaggcaagtgcacagtgaacattagcaatggagaagattatggtccatgggaccctggaccaggatcagcaggtgcctctgagtaggcatccttaggcagcctgtgctgctatgaacacagagaggatacagacttggcatggtagatttgggaatgtgtatggcctgatgattggttttcaaagcacttaattctccgaagtgaccttgcattattttcttatctcattcactcccttggcaaaactctcccagtaagtggttggatgggaagtctcccagcagcctgtttgtgagagaccatagactgtgaactggctgggaccccagtgaatggcggtcccctccaacagaggctgctggtctctggcagtcagaaactgcccagtggcatcccaggagagccagcctggctgagccccatcctgcctgtccatgaactcatcgggcgagctgtgcccactttcctgccatttcctttgtaggataggccaagaaggggagctgagcagcactgagaagagagcagggcagcctctcccagctaggaaaagtgcccagtgtgcagaaaattaggggcccacaggcctggcagccagctgtgcttccccactccctgacaccctgctacctgcacacaaggtgcaatcaaatcgcatgacttcccaattctcagatggatttgttttaccagaagcaggcaggcaccctggcctgttctccacacagcagcagagtaacccttcccccttccccagttagaattggtacacaaaaattgcacataattatacagttggtgcatgcggatgtatgtatatgctcatgttatgatcacagtttcatgcgcgtccgtgtgaagaaaccaccaaacaggctttgtgtgagcaacatggctgtttatttcacctgggtgcaggtgggctgagtccgaaaagagtcagccaagggagataggggtggggctgttttataggatttgggtaggtaaaggaaaaaggggggttgttctctggcgggcaggagtggggggtcacagggtactcagtgggggagcttttgagccaggatgagccaggagaaggaatttcacaagacaatgtcttcagttaaggcaggaataggccattttcacttttgtggtggaatgtcatcagttaaggcaggaacccgcggtctggatgtgtacgtgcaggtcacaggggatatgatggcttagcttgggctcagaggcctgacacacagcccaggtgataaacatatttatcacctccaaacatttccttgtgtcccttcttttttgttttgtttttgtgattagaacacttaacgtgagatctaatctcttaccaattttttgggtgcatagtaccatattgttaactataggcacaatgttatacagcagatcactggaactttctcatcttgtataacggtaactttatacacattcaacaacagctcccatgatctctctccctgccggcccctagtagccaccattttgttatctacttgtatacctctgactattttagatgccaggtagatgagaaattcatcacagtatttgtcctgtgactaacttatttcactttgcataatgtcttccaggtccatccatgttgtaaatggtaggatttccttctttccaaggctgggtaagattccattgtatgtatataaggtcaggtgcagtggctcacacctgtaatcccagcactttgggaggccgaggcaggtggatcatttgaggtcaggagtttgagaccagcctagccaacatggtgaaaccccgtctctactaaaaatacaaaaattagcctggcatggtggcacatgcctgtaatcccagctactcaggagactcaagcgggagactgggaggtggaagttgcaatgagctgagattgcaccactgctttcctgcctgagcaacagagtgagtgagactctgtctcaaaaaagaaaaaagaaattatattgtatgtgtacactacattttctttatccattcagttgccaatggacattgcattgtttccatatctgggctgttgtgaatagtgctgcagtgaacatgggtatacagataacctctttgagacagtgattttattttctttggacatataccaagaagtgggattgctggattatatggcagttttattttttaatgttttgaggaatctccatactgttttcataatggctgtaccaacttatatttcaccaacagggcacaagtgttcttcctttttctcatcaacacttgttatattttgtctttttggtaatagccatcctaacaggtgtcagatggtatctcattgtggttttgatttgcatttccctgatgatgaacaatgttgagcagctttccatttacctgttgaccatttgtatatcttctctggagaaatgcctattcaggttctttgcccatttttaaaatcaggttatttgtttgctatttttaggaatctcttatgttttggaaattaaacccgtatcagataaatggtttataaatgatttcttggagatgacaccagaagcataagcaacaaaaacaaaaaatagataaatgggactacaccaaactaagaagcttctgcacagcaacggatacaatcagcagagtaaagaggaaacctatgggatgggagaaagacactttgaaaactggaggcttctggtaccaaagatccccccaaacctccactcactccccgctcagtgcagagtttaagccaatgtcttggtgggagtcagcaaggcctggtgtgatgggtgcctgttccctgccttcctctcaactgctgccccctcatgccctctgcgcagcccactgttctcaggcatgcaagatacacaactactttggggtctttgtgcttcctgttccctctctctggggcactttgcccccagattgccacattgacttactctaacttccttcatgtcttttgcttaggtactactttttcaatgagctctatcctactagatttaaagttgtcccctgtcccctgatctccagctatcttagtcagtgcttttcttttactgatagcacctttcatcttgtaaaaaattagataaataacacaaggaagtaaatttttgttatgtcatctgctagaagcagaacactttgtgagctgggcactgcgtttgttttctccgaagtgcccagagtggtgcctggcacacagtgtgcgttcagggagcctttggcaggagggtgtgaatgcctgctgagcactttgctgcatttcctatgagcatcacttcattgatactcccagcacttttatgatacagatatttatagtatatcccttttgtaagtgagaaaactgagttgagagcaggttaagtaacttgactccaaagcccatacctttcacctgatccccagttcctcctcctcctctgaatctctgggggtagacagagatcatataagtctgcctacggcttccctgttgagcttccttgggaatgcagagagcatccagggacctggggagtgttgccaagaagcgtgtcctgaattttgaatggtgctggatgaactttcaggaaaactgccacggggacagagagagtgaccttggacaggaaaggctttcaggtggtagaatttccttgcaccttgaacatctttgtagtacgtaaagcagtggtgatgattgctgtcatttatctctgcggtgtttgtcttctttagtaaacaacaagatcagttcctgttttgttctcccccagagcttagtgcctggcacagtgctagatgcctaggtggtgctcagtaaacatttgtggaagaagatcagaacaagcagatttaggccaaagcatggtgtctgcatcctccctgcaaatccccaactgctttgtgtatttaatggcataggcagacaaaataatgacttaccctttgaagtcaatcctgacaacccaaagggaatgattcccaactcaaaacctgaccgtgagccttgcatctcctagtactgaatactttttccatgtcattgggtcctcatcagagaggagccttttggtttctttttttttttttctttttatttttttttatttttgagacagagtcttgctctgtcgcccaggctggagtgcagtggcaccatcttggctcactgcaagctccgcctcccaagttcaggccattcttctgcctcagcctcctgagtagctgggactacaggcgcccaccaccatgcccggctaattttttgtatttttagtagagacggggtttcaccgtattagccagggtggtctcgatctcctgaccttgtgatccacccgcctcggcctcccaaagtgctgggattacaggcgtgagccaccgcacccggctgctttctaagctaactttattggtagagaaatcacctttacacctcataaatgaagctccttcttcctgtagattttgggaaatcctgtattctcagtaggctggcccttacattctctcttcaaacatctggagataaaacctgaggctcccaatgccaaatggttttggccatcaacagattatctgccctacttaccttaccttaatcatttccataaaaatatgaagggaggagatttatagggcttagtgaacatgttccattactgcagcccagcacgccaggccctggctcctctcagacccttctctcggcccagagcctcccacaagagcctttgtgctccctccctcccaagatctccacgtgaaagtggagctcggttcattgtttgctcattcctaatgtaaaaatagattttgttctattctgctcactcctcggggattcctatctagaaaagaaaacagctgaggttggtgactgatgggcctctttgggggaggcttgtaagagctgcatgttaactgtccagagtgaatcctgctgcctgccgcttgccgagccttattgggaagcaaagaggcccatgtggaaatctgtgctggaatgcgaactgaaagtaagatgtcgagggaggattagccaaatggccaggaaggcttctgaggccccaccagaaccctggaacagatttccaaggtgcacttggatctggagagggtcagcctggctgggggacaagtgtctagagccttctaggtcaaagcctgaatttttagccctttcaacccttacttctatgaatcggaccctcaaagcccatggaaactttagggtttttaagatttggatcactttaattttgctttcagatgatgtgtttctatgcctcaatgggacagaaacaaaaactaacggttttagaatttcaaagaagactgttctggttcagaactccaaatgtctgtgtgagccaaggacatacttattgaaatgtgtttcgtctccacagaataattaccttaaccctcctaaagtactgactctttcccttcctcttgacttaggaaaggggctatatgctctcttcattaaacaaaactacaggtacattaaaaaaatccagagagagtcatcttaagctagggattgacagctggctcactaacatcaggaaaaaggggtggggtgcagatgctggggtgtggatctctgcttccacctcttgtaagcagaacacttaaagattcccagtttcctcttgctgcaatagattcaccagaggtggtaaaaggctgacttagcagtctctccaggctctcaagaaaatcccagaggaacagccctatggttcacacagacatctcagggatgtgtgtatgtgtgtgtgtgtgtgtgtgtgtgtgtgtgtgtgtgtgtgtgtgttaaaaagataactccacatcttcagtgaaatatcccccctggatcaccacttcttttcctgctacaggctttcatagtacctgctgttaatattttccttaatgacaccatcttatagttaaaattagatattattttggggtttctctgtattaactctatgcatcataaattacataagggcagatatcatgttcctctgggtcaccagtggatgcccaatgctcagttcgttagcacatagtagctgcctgataggaagttccttctgtgtgtgcgtttgtgtgtatgtgtgtgtgttttttatagatggattggcgagggtgctgggagcctctatgctactgaggactgaacacaaagcatgtgcttgcagggtagaaataactcaaactttcatggatggagcctgacactccctggactcgcctacctgtgatccctggaaggctagccttgttgaccacaacaagggagagtctaaagtgactaatctattaggactagccacagtcctaatagattaaatactgtgcatggcattcagtccagcaggtttaggcaccaagtgcctgactttgaaggctgtgaagggtttaggaagacctcttggacaggaacagccaagaattccctgtttctctgctgttggtggccccgtccataggtcgtcctccagaggccctcaccttctccatatccaagcccctgcctcctccctcagcctcaggccagcaagtgcgtctgctgggcttgcctcatggtctcaaggcaaggattttgctgcgcttgcttctctcctggattccagggctgttcaggtccacctggctggtgctgttggtggaaagtgtaagtgtacttagaagagtcaggaaagggaaatatcttctcagtgttaatgtggaagcggaaattcagtaggagtaaccaggagttagagtcttacatttgaaggtcagagaagctgagtttgatgaccaacttaggcttgtactatgtgatctcaaacaagccactgaatttctctgggcttctaatttgtaaaacagccttgctgatagtggctccttctcagttttgtgacaggaaccaaatgagcaatagcatgtggcaatatctttcggtccaggaaccaatgagggaaatgggataaaattattgaggagaaagaacaaggtgaatgagtcagaacacccgcaaaaagaccttgatgggacatgaggcctcagaatgtgaaagtgcttcagaagaaccctccagagctttctggaaggaaccctctctgtccttgctgcggctgatgttttcaatgacttagttgtagaatttatagccagaactgactagcctctctctagctgtgtgggaagatctgtggatgttggtgtctttgagccagagagggggtttggcttgttttagaggcagtgtggcacctcctgttgtcttcagcccttctggactccaggggcagtgtgagccgaggtgtccacccctcatgccttcatggccctgggcctctcagttatgtatgtgatgacttggccttccaggcaccaagactttgatcaacctgagtcaggaggtttgtgtgaaacccttcctggttttcttttttaaaacacaaatggggtctggaattgatcccagataagacatctgcctcttaatttcacttcagagaggcaggatgacaagaaaggcgatgaagacaactaaatgcatttatgatttatgccccctgtgataaatcagtggatgatttctccccaaaatgtggtcactgcctgactaactcataccagctgacacatctgtgagatgcaccagcagatgggggctgagccccttccttgccatgtgcacaccagtcctggaacccagcaccctgaggactggggcttggatgtgtgagagagggggtcatctgcatgcagtgtggaagatggccacttcactgccaccctctcctgcctgtgttttcccttcttgcgtcctgatggtgtagtcatgttcagcctgtccttggttcatctccagcattcctttctgcgctcgccttcatgtgtggtgagttagatttttccattccctaaaggtgatttgagcaggcccagttctcaccagagtccctcaaagcaagtgtggagagtggaaaatcacattaactctttcattaactccagctgtgctgagccgaatcggcgatggcaaagaggttgcatccccaagggccagcttcaggccttctggggtagctttctggaatgctatcttggataggctttttagggccagtctggccagtaaagggaccagtgagcataacctgccctgcacaacaaggccagtggtgtccccgtgccatgggtaaggccagtagtggcccttggacagtgggtttaccacccgtttccccaaggtctccttgtatcctggatgcttgaccttgcatttctgaactcagaaagccatatctacatgttccaaaatactctgtcatttgaaattttcagaaatctgttgaaccctattttggctgcttggcagctacacagcagctggattgcttactcctcaccgccacctccccctttcagcatcatctgaagctaatttatccaggagtaacttggtctttgtggggaaatgtcacattttattttataagttaactgcaaatgaaaccgcctggttgtacctctcattttcctcttgttgaaaaatgtctttgttccatcatatttttccctttcttttcacaaacttgagaaagtctttggcaggtgccaaggccatttcgtgggcctaagactgggtggtgagacctcctgtagatgggaaagggctgagcagggggactcagaggctggtgctttctctaggaagtaagcaaggttgcaggagctcagcaaggagggagcatggggcaaacccgtggctggaggtggaggctctggctgtgtgttggtacatatggggctttagctggaacccctgactctgggaccagattgccctgctccatgcaggctatgtagagaaggaaaaatgagccagctagtaaaggttcatttgatgtctctgcttttcctttgtattaccattgttccagccagaaataatatacctgcagctgtgtttctgtaggacaatggggacatctaataatatatcgggctgacctaagctgccttttctccagcagtgccccaaggggaagatatatactccacctttatgttatccagtggtactaatcagaaaccattgctgtggaaacgacatgtcctgtttggttcctttctagcagggaatcgtaaaattaaaagggagcttgatagattccgcttaatgccaaaatgaaatcctgacatactttgctggatattacataattagttgacttctcaaaggagttctaattatgcctatggaataagctcaagataatgaaatgcattcatctctctggcaaagcggtctgtcgcatagcatggagtgccgagtcagtcctccagggttcgccttcttgctcaatgaacaaagctttatttacagccacagaacttggaaatgaaatacaaagttattttatagtgtacttattttttatttccattaagaaaatcagttttcctcagctccatatactactgtgtaaatgaccacatgtacagtaactgcactaatcccaaaacataaagatttctgctcctgaatgcattagacggctcataataccacaaaacctgccagagataggaagagactactgacaggggccaaagggaaagagttctttggccccaaattttatgaactgtaacattaatagtaagggttgtagcgatgggtgggtgggtacatggatgggtgagacagaggatggttatttttttttttttttttgagacagggtttgctctgccacccaggttccgccacccaggctggatttgcactgcacaatcatggctcactgcagcctcaacctctcaggttcaagcgatactcctacctcagcctcctgagtagctgagactacagggatgtgccaccatgcccagctaatttttttgtagggatggagtctcaccatgttgcccaggctgagaatgagtatttggatggatggatgaataatcagggaggggtatagatggaatagaactaactcagaaaaatctacctttagatatattatccagtatttgattgctagagaacatgatgaggaataagagggtttgcctcctaataattccttatttataaaagggaaactcaagaatcttttagtttctcaacagacaactttaaaaggtaacagcaaagagatgtaggaaaagttgacttggagggaaatagaagaaatgtcttcaaagatagtcatattctaacagcttaaaatataagataaaatacaaaataaaaatatattctttacaaatatgtcattggtgacctaacaaagttggaacaaagctctgcctaggtttctcttagcagtagattgttccctaacatgttagtgaatggaacccaagccaagaaggaaccattcagaatggcattcattggagcgttactgcctcagtttctatatttaaaaatgaagatgctctgtgtgcagagatctatccaatgccattgctgacatagtgataaagaaaagtcagggatgcctattagttttcttcctccaatataaggactcattaatctcctctgatgtctgcaggtaccaaagacattttttgctgtgaagtcacctcctctcccaacttgtcctttaaaatatatgtatagaaagaaaggccttaaaaggcgttaaaccacgtttttctaagacaaaagatcagtcttattttgtgacatgtgattcagggtgactgggggattacctggtagtacgaggggaacttggacctgtattgtcaacctcgcatggttggaagtactttgtgctatcaaattcctctgtctggctcgtcacctggggcagcagaatcctttcaagactctgcccaggtggatggctgctgaattctagtggaacatttgagggcagttctctggctctagcggtcgattttcctcctgtcagaagagccattcatgaactctgttgaccaaaaagttaattccttcatgtttttagcagaagcagctcattccagcttaaattcccaaagatcaggtcttctcatgttaattactcatctatattctggctggcacagtataactggtacatgaacactgttttaaaactctgctgattggatcatttatgagacattcatgtaaaaaggaccctaccttgaactattttttttcaaatataatgttggaaccctaggacctcaggattagaagaaaacaaagagtgaactgtatgaattggttttcaagactaacttatgacacctgcgggccagttttgttttgtgcatgttggatccataatctgtaaccaccctccaaggcagaggctggaaggaggtggcaagaagaaggtcagatgccatttgtagtggatgcatctgcttgccatggttagataaagaggttttcattttattcctgttccatcagagacaatatccctaccatcactcaagccagggtattgaaccttgaaaactgatgcattgcctgtcatcacacagaccactttctgctgagttaaagaaaagacacagtctagtttgttggaaaatggtgatgaatatttggaccagatattaaaagagtcaaaataaggtcaggtgccgtggctcacgcctgtaatcctagcattttgggaaactgagctaagggaattgcttgagcccaggacttcaagatcaacctgtgtaacatagggagacccagtccctaaaaataattttttttaaaaagccaggcatggtggtgcatgcctgttctcccagctacttgagaggctaaagcaggaggatcacctgagcctgggaggtcaaggctgcagtgagccgtaattacgtgactgcactccagcctgggcgacagaatgagacccccatctcaaaaaaaaaaaaaagtcaaaatagatatttttatattagaattttatatcaacatgaaatggcaagcagaattgagaaaaagaattttcttattccgaaattcagaaggctatttattataaccttgctgtgtttaagaaaaactattttaagagcaaatatcatcagtaggccttgggatacaagactaaaataaaaaagcaaatcctctgagcatgggagagaatgccttaaatattagtaagaagttagacctaattttaaaaattgggttaatcagacatacagtgccttgagttttttctcttttctccaccctgagtcattagtgtgtctgagagggaaaagacctgagccttcattctccatttgtacaataacatttaatcaagtgcaaacagccctgcagagttcaggagtgctgctggagctaggatgatgggtctaatactctagggaccaagaacaatgaagctgacatgtgggttcacctccgccattgttcaaggaagcatccgtggccttttgctgtgtttaattacagtggcaaaatctcagtcactgtttacacaggcttattgctcaggtgtggaaatgcactctaggctcacttttggcatttgctttgtatcggggagttcttagtctcttgaattaaaaatacattcatccattccttctggtgttacaaatgtaaatatcttcaccaaccctgcagggattgccgtagtggtagatgggtttgttacttcagccacttcacacaggagacagggaacctgtgggaaccagtcaattctgtggtttctgcaagtgttccttcaagatggcagtggtcatgcagcctggaaggccgtacagtgtccaggcatctagtctctgtcagggcttacctcaaatgtgggcttttcctgctccaaggcacaagtgccttctgtgagatagcatttttagatgctgttccacctcccacaaagttcctattactcagtggaacacatacaccttccagatttcaatagcctaggtcatgttcctttttcatgttttcacatgggattatattccttttcttcttggcatttatctctgattcttacattctcattagagatgtcttattgtttggctccttcctgaaactgtgaactccacaactgaagagtcagggctagcttcatgagcatgctactgtacagttaaacacggttccacattcagaagggccccatgcttggcttaatgctctgctattttcatcttgaaatccttaatacttttcacaatttcattttgcaaaccacatagtcagtcctgggttggggccatgtccatttctgttggatctccagcacatggtgtgtgctcaaggagcattgtgtaaaggaatgtttcagtgacaaaagatgatctcttttcatgagggcatgaagcataaaatctctaatacctaatatcgagtcaggatgtttcatattttcctggtggttcacaacttaatctcattgttttcataaagtttggcaaatgcagccaaaattgaattaaagagacttgtgtattatgatctaagaaaaagaattggttgcaaactgtaggaagtataaaagtggactggtctgttgttaattttttgttctatatttagaacctaaaggatgatgtttagagatcaaaaatgttaatcgtcttgcaaagagtgctagacactaatgagctggggcaaatactgcattagagaaagtatccttcagatgatagaggaagttgggacaatgactggggctctttaaaaaaaaaaacttttaattttatttttaaattttaatctatttatttgttttgagaccaggttatgagactggctaatttttacatttttggtagagatggggtttcactgtgttcccaggctggtcttgaactcctgggctcaagctatctaccctcctcagcctcccaaagtgctgggatgacaggcatgagccactgcacccatcctggtgactggggctcttctgaaatgcaaaatgtgttttccattgtattaattcaggaccaaggaaacactgaaacaacaaaatgtccagtttgatttccccatcatatagctggggaaaccttgctctcccccacaggaagcttggcgaaaattctgctgtagagttcatggaggaattgcaaggcttcacagttctgtgcagcatgcccatacgttttctgtcacttgtctgatttggacatacattttcctattctctcctgcccacccaaaaggtgactgccacagattgtgaagttggcaggattttccaggctgtgtcggcacaagctgttaataaattaggtgcacagacgtgtgctggcaaggcgtttcctcctggagttcataggccttccagaacatttatgtctcattacagcccatacagcagtttatgccctaataaatcagagaagctttgcggagatgggctggaccataatgaatctttctgttggcattttccctttacaggcgcaaataatggagcaaaaccgccccatctggccactctgtaagagagaactcacagtgggaagttgttttctcaagcatgacaaaaggtcatcccaggtagcaggagtgaggggaggcagctagggctgtgagtgacaaggtggaatgaagccatttatgagcctttatcactgcgattataggcattagctggactgtcagggtcctgttctttcttcctgtgataggtcttggtctttgctgatttttcacatttaattttcagacctgtttgttgtcttgcaaatagcacaagcagacacacaccctcagcctggggtgtggacctgcttactttgatttatgttttattaccttgatgagatgcattcctggctcactgggaatggctactgagcagagtgaagggaatctgcccatcaaccccagatcagcttctctctccctgccttccttcacccatgtgacggcatgtgagatgaaagccaagttaatatggaaattattattaataatctggtggtggacagaaatgtattttttgagctaggaaatcaacttgtctagtggaggtttaccagttgtaaacaaacaaacaaaaaacataaatcattttaaaaaccacacctagaaagaagcaaaaatttgtttttggtacttcacgcattttcacaagaaggcccatcctccattttggaagttaacatatattaatcatttcctttgtatctagtagctggggtctcatttcattggagaaaaatttggatctcattaagtcaaagaaactgtctgattgtttccctccatttccagtctagttggtctgtactcctaccctttgcagggctgaaggggagcttcagagacacctgggctgcttggttgtgctcacagagaggctcttgggagcctgtgagagtgtaatatatacagcaggacctatttctattctattctgtaaaggcttggctggtgcctcttcagtaatcactttgctgttgggaaggcagaggagaaagtaagtgagggagtacatgatttatcaaaagtgacaaggagaacagagctcctctatcagccctcagctaccctcctatttatataacacctttccttccagtgtttcccccagcagatggccaggtgaggttcgtggtctctgcacggaaatacagctgctccagggcaggaatgggggatcttttgggctctctcccagcagaattatgcaatagtccatggagggaggggacaaagtcattccctagctgaagcagccctggaaatgtagacttaaagccaagtgctgcttgcaaattgggaggttgccaagacctagcaccctaagactcaggggttaaagtaaaatcctggaggagttaagtaattgaccacaagtgggtctgcccccatctgcccctgcataatgagaaagtcagtgagacttgatggggtcacaaaagcacagcaatgtgttgactgagatgactgtgctctgccaagggaaagagtctgcccttcaaagggattctccaggtgtactctgaaagtttccccattgtcctgttttatcaagatccaagaaccaaaggaggtccttgtcctgcttgagatttttgctctggggttgagcatgtgagtatcaggagacctcatttggtacaggatgttgaacacacacagctgcttttttaaggtttccatttgcaactggttgagccgtaacaggtaattagcacctttgctgttggaccaagcggtgcttttattggttggagtttcttaattaggctggctgctttgcagttttggggaagagaatttagagggaaagcaggaatgctgtgtgtctcagaggatgaggccaagctgagaaaacagccagagggtctgagttcagtgccccagcccttcagtgccatattctaatcctaccctgcaagttctaacctcccgttggcctttttctgagatcatgggtagacctcagaaatggttcttgtatccacacttctctgaagtgtgctgatgaggactctggcctcattttaggggttgtttccagaatgaaaactaaagatgaaatggatttgttgggaatagtatgtgctattgtggacctgaacacgttggttgtttaactcagcatcacatctatggattagtcaggactgaggaaatgtcctgggagcaacttgtttggctttgccaagatgtcagctaaggcactttcaaattaggtgaccttgtgcaagacacataagggatctgtgcttcggctgtcccgtgtgtgagttaggaatggtcgtgttcactctctcctagagtggtcgcaaggattaaaggagatagtgcctgtaagcccatagcatggtggctggcacgagtaaatcctcaagagatgacagtgtgataccaatgacaacgattgtgatgatgataatgacgatgacattgttactttagaaacccagagtccaaacacgtggaagccagtttaggaatgacaagtaaatttactctcacatgccagcttctgttgatggggtgactgtgttttacaagattctgagactacacatgggcttagggagagagagctgaagtcctttagggatatttgtctttggagatggaatcaagggtgatgccacacatacttctgtctttaacagctgtgtaatctggggtaaattcacctctcttagagtctagttttaaaaatccatataatgggaaatttggaccacatcagttttcttggaagtattcagccaaatgttaaaaggtgtttggggtgggtgtagaaaagattatttgagtaggttttggaaatgctgtgtgtaacagaacaagttaaggcaggtttcttcattactggacttctcagcacctttagtgtgcttgaaaattccaagaggagaatatgtcattcttcccaaacttatctgatcaggaaaacatttgttttgcaaaacgcaactcatgagactagtgttgcacagaatggatttggagaaattacatgattttcaggatccatttttctctccaaattagtgaaatctgtaagtctcaaaaacttagatgagttaatgactgcactgcctcaccatgaacttttcacatgttatcaaaaatgaaactcctttcagggcacacttaaatgacaatcttttgttctttgaaataactttgaaaaatatcaaaggtaatatctggtaggacattaatccttaacatctataaaccatcctgaatctcagcttcaagtgcaaattatgctgatgggtttggcacaccctttggctaaaaagcttctttctcaatatttgaccttcctctctggactagggtgcagtgaggacctgtgaggtgaaaggcccttcactctctcctctccaccctggaatccagctgccccttcacctgccagcctgcctaagaggcagaagaaagcctcatgtgtctctagacttaaaccgccggcagctgtgtcttccatggctgatgaagcagagcaagggaggcagccagaatagcctaggaaatctccaggtttctgttgatttctcatttgtcattaatagtaatagataactttttactttgcatggcatttgtcagctgtcatccctgaaggctgttgaaactatttgggagcagtaataacactctagaataactttgggtaattgttctcttttagccagcaaaagctttgaagatgcttggaacataaatgtggtccccagggttcctttattctgctgatgatacagagcattattttttcaaaggggagccacagagcctgagcctcattcattcattcattcattcatccattcatttgtgagggagttaaagaggggagggtgttggaagttagagtgagtgagaaggggaaggaggatggaagtttgaggagagaaacaggtataattgttgccttaggagagttgggaagataattgagcagggaaaagtagaaggatgaccggcagtggggaggagcccctggagatttttaattataaatttaaagtgggactggccaacagggttgtgtgtttttctccagccatatttagctgcttgggtgcaggtacaaaggaagtagaaagttgggtttaaagggttggggttcaagttggttggaaggatagttaatagaattgagtgtagattcaaaaggagtgagccttggaatctgaggtgggtaaaaaggaagtgaggataagagagaggtggtagacagtggaggatcaactattttgaggtcccaacatatgggaagtgagctgatggtctgatagctgagttcagaaagttaagattttgtagggaatgcagtattgacaatgacaatgccttggctataaccatgggagtaggcagtagaagtcgggtagaagacaccattattgagagagatggtgttaaggagctcagaggctaggattttaatatcactaagaatgacaacaggaagagactagagagagccagtgagcccaatgctgaagtattcatgagtgattaggcagtcaggagacagcagcaacaagagggccatggttagtctagcctgacaaaaagcgcaccacaggatctgggctttttcagaggaggagggggacatttttggatttggcaatacctagcagagaagatactcccttgaatttacaggctgcatggtatgcagggtttgggagacagggccatcacttgataggaatggaggaagcagaattttccaaggacagacagacttggacagccagatggagcatgaaggtgaagatgaagttgagggtaggggtggaagatatggtggattttgctgatgctgaaccaggaatgacagaggacacacacaaggagtttgggacaacaaaggaacggctggacagaggcagtcatgtggggataaggatctaggtgttgagggctgacctgaagggcctgaccttttctgttgacagaggaaaaaagtggtgaaagcctctcctggcccctggggaaaggtggtcagtcagtcctcttcatcttctctccctgaagttcatggcttaggcagtgggcagggatgagtctaggactcatttctgcttagtacagtgctgaagtagagggaggagacgcagaggatgaaggccatcatgctgctgtgcattcctggggtgccactcatatttcagtcttgtaaatgcacctccatagttgtgcttgaggcaaactatgagtaaaaagtctcaacagtcaaagaagtttcggagatactgcttctagtgcacccctctgaagagtgacgaaagtaaaggctctgagagacctacaacaggcaggcctgttcagctttgtttgcctcagcatttcccaaacctgacctctccattcctgaacaccatcccttccaagatggtgtcctccacaccacttccaccgcctactcccatggttatatccttgtcttgggatcgttttgtcttccctaaaatccctttgatattctgcagaaatggccttctttgaaacatgcttgtgtaagtgctgggttttcatttcagtgcaatcacgagctgaccaccccttacttccctgagcctccagttcctcgtctttagtaacatcaaccacgcacagttgttgtgggaatcatgcattaacacaggtgaaagacctaacacgattcttggcttatagcaggccctcaataaatcttagcccctttcctcccctttcccagcagttccttatttatccagacattgaaactgaaatggcaaagtccatgttaaagggaccatgctctttacatataaacagagatgattgaaagaatggttttattgctagcttgtgtttacacctggtgggacctgtcttgtgtctctcccagcacttagcatggttcctgggtctcggtaagacctctgtaggctctgactaggtacctgggtactgttgcgttgttcaaaccctcctgttagacatttattgttgggttgtatgcaggggtgtgtgctgggcccctacctgttgggctgtgtagagggcagaagggttcagataaatgagccagagagatggcatctggaaaaatgcccttctgctgcatcttggtatccagatcattggaattgcccttcccataggctggcaggaatcccagtgagcagagactgaatccactttccctaaggagcactcctgaagttcgattagttggggaaggtcggaggtgcactgtcagctgcctgccaatgagaggggagagtggcttaattaaacctaaaaataaagttcgatttagattgctcttgtaggcagaggaaagatagattggccagggctaagaattttgaggccatctcccttgcatttaactttgaccccccaaaacaactgaggtaaaataaattttttggcaccaagtagggagtcagatgtccgtaatgcattagttctggttcagcacgttcagggagttggtaattagttacagccttttaaaaatctctctttaaactcaaatgatgtgtggcatttgagattcagaaaggagttgatatgtacgtgcccttgagcacaatctcctagtgtttaataaatagatatccctggaataaaacttacatgattaagtttacaagctttttttgtgccccccaaatatgtaactttacttgctaaatttaaaactgttgtaacagtacttggtaccatgagtcttatacccatttactagaaggtaacctcagctgccttattttatgcaagatagtctggttttggtagttctacaggaagagggaaaataaaaaggaaaggcagacctgagcatatgtgatatattctaagttttctccttttttcacataaatggcaagattgagttgatatttgaactaaggcaaaaattagctatcatcacctggacttataaatggtactcttcaataaaaagaacaggcctctatttaaagacagattgaagttctcttcaaataagcattgtgatttaacattcctttgaaagcaatgtattgattatggatatatagagtgagtagatgaaaatttgattaatgcttgaaacaattaaaacaatgatatttgaatagtttttgttttttttttggggggggggcaacgtacttactcgtctagtctctctcccaggaatatgttacaaatcatgttttattatcatgaaatattactatctttgccccagttgattcattatttgggtgggaacatagtcaagtctctgaaccaaagaggatattggaatcttgttgtagtgaccacaggagtaaagtttgattgattaagctgtgggaggaggagagagagtaattttagtcttaaaaatagatactcatcagagacaaagaaagggcaatagaccacagtatttaggagggaaagttgagttacctttagagtcctgagggacacatgtgtgatgagagagagaaatgaagcaagaggtgaaaaattcacagaacaaaaatgtcgattattttaaaaaggcacaaggaaaagacggagggagtggtagatgggtcttgtttttggagacttcttttgaatagaatgatctgaatctaaggggtctggaaaaagttccaggagcttagatccctgggaagggagggaatatctaggcagtaggtttgccctctattttagacagacctttctgtaataatttagcttgatgtttccaagagagaagtagtggtgtggttatggagaagttaaagtgccttctgcattaagagttggtgattgtatgatttgaggtctgctgtttacatagaagaagctgacaagaagagggactgcaaattgaagacaagagagagtttaataggaaagattgggcgtagaggaaatcctgaaattctaaccacacctgagggaaaagagcacaataaaaaagtagatgactggccgggcgcggtggctcacgcctgtaatcccagcattttgggaggccaaggagggcggatcatgaggtcaggagtttgaggccagcctggccaatatggtgacaccccatctctactaaaaatacaaaaattagccgggcatggtggtgcgcgcctgtagtcccagccacttgggaggctgaggcagaagaatcgcttgaagccgggaggtggaggttgtaatgagccgagatcgtgcaattgcatcccagcctgggtgacagagtgagactcggtctcaaaaaaaaaaaaaaaaaaaaaaaaaaaaagttgatgatcaagttaattaattgcataaacatttctttgtttggtaaaatttgcttttttctcaggtttaaaaattaaatgataatgaattaaagacaaaaacactggcgttatgattaggcaagtgtagcagtggtagctcaacgaacagtctgaattggaatcccaaggaattttgttttctataatgcaagatttcaaaattcaggaataggtttcttctttgtggagagtggcagaaggaaggattaaagaccctaacatttggtcagccaagaacacagaatccagaagatgggaaacatggttcaagacttacctgtcagccaggcagcccctctcttgccctttaagacccaaactcctctctgtctgagttcccttcctctgcggtcccattggtccttttccttagcctccttagggctcccttaggctccatactggaaggggacggtctttgtggcttttgaatgccctgggtgtaacagctgcaaaataattagctctttagggctgcaaagactagcctgctctaggcattttcttgggtattatatattcaaagaggctctgtctcttcccaagtctactcaaaagcatccttttcttatctcaccttagatagatgctagagcggttgagggaataggaagaagttcagggcctactgaggcagcgactgagcactccatatcctctctgtgtgcatcaatccctgggagagctggggcagcaaggggtccacacatggtcaagctgcttgcagttttccagattgtggtaggcctccattctttgtgcaatgtcatataccctctgcctgagatgaccccttatctctgtgtcacactcttactcatccttcacagctctgctcagaagtgcctttgtctctggcagttgctgacataggaaatagattcaggaccatgcagaccattctttgaaaacatgcttcgcagtgggttcaaggtcagcaaaatgtcagacttgatcagtgttgagtaggtgaatatggcgtccaaaggcaaaatcatttcttatttttaaataaaatggcagagctactgtgaatattttccatcatgaataaaattacctttttggcaattgccaaatttgcaaattaattcaaagtttgaaacttttaaaatgctgcagcaaatcgtttattgcttgaaccagtgtgatagatctgagtgaacatttttgttgctgttaatttaaattctaaaacctgtactttatgaaaaccagtaacagcggaaagagatacttttagttcttctttcctatatgaacaaaatataattccctcacacaaacaacttttgtaagggaggattgtagggcatggttgggggaggttggaactgtaaaatagcctccagattcattgagaagctaaaaaaaaaaaatggtttgctagggaaaaataatcaccagctatgtccctggatcaaatgtgtggatacttccaaagatatacattcacctaattgtggaaaaggagaagctgataatcttgctcagctcaacaacacttcctttttattctaaggttttgttctcttggctacccagatgtttctcatttttccagatgtgtttatatgtttgcaagtttctgaggctgtgctgatgaatggagtttttattgaatttttatgtagctttcagatagtaaaaatgtgcttaagcttcttcaacatggcccctacccccagcctgggtcttgcctgaggagacttcttattctgtctgggtatcctcagggtttccctggcctgtgtgtgcctccagatgctactataattaagatatttgcaaagaggaaaaatggcatttgtgaatgtagcaggaggatcatgagctgctggactcattgttgttggtcttctcctttgatgtaagaattgatcgaggagaggctgtcctccctgagtgctctcattgtgccatcctgtacagagacacatgtttactttcagattgcatttaagacctttggatgcttgggaggtttttcagggttatagctatgttgctgcattttgaaaatggagttataatcaataatgggtagaagtgaaagagcccttcctctgatccccagttattctccaggggtagactgagcactcactctgtgtgccaagtgcagggctggtcctggggctgacaaccgaggggagaggtagacacctttcttaagccatggaatgttgattctaagtgtgagaactctgttgttaagagagagaacatggctttttcattgattatctaatggcttttttccctaaaatctgatggctatatggagttcccatttttaaaattttcctctgtgttattatctaaggagagagagagagagagagacagagagagaagagagagaaagtagacaaaactctgacttgtgaccatatctctcaagtctattataccatgtcatcatggtatactgtgtcatgtatggatagaaagaatagtgagaccaggcacggtggctcacacctgtaatcccagcactttgggaggctgaggcaggcagatcatttgaggtcaggagttaaagaccagcctgaccaacatggtgaaaccccatctctactaaaaatacaaaaaaaaaaaaaaaaaaaaaaaaaaggccaggcatggtggcacatgcctgtagtcccagctacttgggaggctgagccaagaaaatcgctcaaacccaggaggcggaggttgtagtgggccaagatcgcattcactgcactccagcctgggcgacagagtgagactccatctcaaaaaaaaaaaaaaaagaatagtgaaaatattaaacagaggtggacatgatgacatataggggaagatagaaggttggatctgtggagaaaagtattttaacatttaaatgtctatgtgatgcaagttttttgtttttgctttctgaaacagagtctcgctttgtcacccaggctggtgtgatgcaatctcggctcactgcaacctctgcctcctggggtcaagtgattctcatgcctccacttcccaaggagctgagattgcaggcaggcatgcaccaccacacccagctaactttcttacttttagtagagatggggtttcgccaagttggccaggctggtttcaaacttttggcctcaagtgatccgcctgcctccacctctcaaagtgctgggattacaggcgttgagtcaccatgcccagcccctgatgcaagcttttaattggtgaacaacttaggttcagagaaaataagtgacctgcccaaaaacaaatatgggggggatttggaatttgaatcatgtgtgcgtgattgcaaagtgtgatgtttatactgcattctggctgcctccttttgtgtctcatttatgcaaaacagaacagcacacacacacacacacacacacacacacacaccacaaaaccctagtaatgtcatgataacaaaagtatttaaatataaatatgagaaggaaacagaggcataattatatgcagacttaaagttcttctttatgttgtatatcattagaacgttgagaatgaaatcaataaggaatagaattagcccgggcgtggtggctcacgcctgtaatcccagcactttgggaggtcaaggcgagtggatcatttgagccaggagtttgagaccagcctggccaacatgacgaaaccctgtctctactaaaaatataaaaattagccaggtatggtggtgcaggcctataatctcagctacttgggaggctgaggcacaagaatcgcttgagctgcagtgagctgagatggtgccactgcactccagcctgggtgacagagtaaaactctgactcaaaaaagaaaaaagaaattaataaggaatagaattaaagaattacaagttcaaaaagtgagtatagtgaatgccttcagaatggcctttaaatatactctattttataaatacatctggaaagctacatctggaaaggaagattaaaatctaatcttcccacaaggtcatcagtgtgattcccaagcagtaggcttgggctgagcactgcttggagagatcaagtggagacttggtgtgttcttaccatcccaccacccactgccttctctgaagtcgagtcagtcttgatgacgtctctgaagctgagctattaattttaacttctgagttgattaaattttatgacaaaacagcacagtgaaaataggaaaagcaaaaattggatcttggttatcttgcaaaagcaactagataaagattctcataaacaaaccaatatagattgtatcctcttccccttcattcacaccccctctacaaagtttctcactgacaggaataaaaaggaatgagatataactagaaattcacttctgaaatggaacactcagcatcacagtagtaatgaacttcataaatgccaccatccttctgcagcctcaagttactaggagagaacttgcctgagatggcagctccccacagatagaggtgtgagttctctctttccctaggtaagaggtcttggagctagcttctctgtatggactgccttgctatgtctggaaataaaaacacaaaaaccagatatacagacaaaaactttcaatgtgggcttggtcagcagtaggaagtagtgattacaagcatggatttggagttcaatgcaccagcatttgattccaggccttgctacttgttagccctgtgacagtggacaagctctccaggagtagtttctttgactataaaatggaaattaccaatacttaggtcaaaggtggcgagcattgaaataatgcatacaatacacacagcatggtacttggtgcagggaaagcgaccctccagtgttcactgtcatgcttccccttcttcctttcttaggagaactattgccatcaatactatgtttctcagggatgccttgtatcacaaactagatggcctaaaacaatagacatttattctctcacagttttggaagctagaagtctgaaatcaaggtgttgtcagggccgtggtctctctgaaaactctagagaagagtttgttccatgcattgctcctagcttctagtggttgctagtaacccttggtgttccttggattgtggcagcataactccaatccttgccccttctttcacgtggccatcttcctctgtgtgtctgtgcccaaatttccacctttttttttttttttttttttttttgagacggagtttcactcatgtagcccaagctggagtgcactggtgctatctcggctcactgcaacctctctcccccaggttcaagcgattctcctgcctcagcctcccgagtagcacacgccgcaaccatgcccggctaatttttgtatttttagtagagagatggtttcaccatgttggccaggcgggtcttgaactcctgacccatgtaatctgcccgtcttggcctcccaaagtgctgggattacagctgtaagccaccacgcctggccaaaatttccatctttttataaagacaccagtcatttgatcagggaccacctaacccaatacatcctcaacttgactgtatctgcgaagaccctgtttccaattaagcccacatttacaggtactggggattaggacctcaacatatctttttgggagacacaattcagccaacagcaaacaccacctttattttaggctggagggagccttggcttcattctggatcaagcacatcatctgaagttacctgttttgccagctgctgtgtcttctcctgagtggacactgcagacaatgctaacatttgcttattgattacttcactgggcttgttctgtcttattttcccttggtgcatttccccttggtgcagtttgaatagatagtgtagatatctgatcaaatggcaggagacactctgacctttcacatttcctgagaagcccaggagacagcgtacaaaattaaaaaccattattaaacgtttgtcatgttaaaaaaaaaatcccatgttaagaagttctcaagtgaacacaaattgtgagagcagcccagtgggtccagcaggtttagggttggctgggctggctggtgtgattctcagtcatataagaggagggtctacaaagtcgcctccctcttcaatctcgtttacataatgcatgcatcccactgcttggagtgcaggaaactgtggaaacatgtgtttaccttcaaattcagcaagacatgaaaaccctgactttgattaaatgtcaccttacaatctatcaactcctgcatgtgcgtcttggcagctgagacaaatatggaaaatgacgaggctccagagaacaaaagcctgtggggcatatttctgagggtggttcaacagccgaaaaatgcagagggatggacttcctgaggccagaaggtcatggactagctctgaaaatgagaatgaatgaaatcaacaacaagaaaaagaaaaaccgttcaattgaatgaatgaatcggaggtcctcaaagtttttctgcaaagtgccagatagtgttttaggctttacaggtgattgcagtctgtgttgcagttacttaagtctgctactgtagcattaaagcagtcatagacaacatgtaaatgaatgggcatagcagttttccaataaaactttatttgcaaaaactggcagtgggccagatttggcttgtgggctatagtttgccaatccctggagtgaatcagtcagtcaatctgattactttccttctgaatgcctttttctagaagctgtatattacagtgactaagaaacagatcctggggaaaatacacctgccttcaaatcctgctgttgctcttgactagcaatgtaatcttaacctccgttgtctcatctgggaaaataatataccacctataatgtgctcagcattgtggctgacatcgtccctacctagtaactgttcatggctagctattagtacagacaactgcaggaagacttcttgttcatagagaccacccctggtcattttgtgttttgggagttgttttctttggctatcacctgattccttcctccacctcatcaggtgaaaatcatcactcatctgtgctttcctactataatcattaacttatatacacatgtgcctccttgtagactgtggggtgctcatgggcaaggacaacccttatgcttctgtaccctattcctgcacctgccctgaaaggggatcagtaggtgtttgctgcattacatggcttttacagaaatacttttaccattgcagtttgaattgtctcgattctcatagcaggactgtgttaatacaaataatgaaatagagcaatctccctatctagctagaccatggtttgctaaaatacaatctgtgggccaagtctggcctgctgcctattgatataaataaagttttattggaacacagccatgcccattcatttacatattgtctgtggctgctttttcactatgtggctgagttgaatagttgcaacagagaccaaatggcgcacaaagcctaaaatatttagagataaagcttgctgacccctgaactaacaacctcttcaatagtactctgactagcacttgtcattaaactgcagatggttcagatttttgcaggaaggatataaatttgttagtctatctcaagattcatggtcaaaggttaaagtaatgttaagactgaatctacaaaacaacaggaggtaagagaaagaaaacaggtgtacgtttgaatgtcttcccaattcacagtgtagtaggttttagatactctataatttaggcttagtacatggctatgtttcccaaactgtgggccgaggtaccctttggtatgcagcaaaatcaccagggctctgcagaatattttacatttccaatgaaagcacagcttagcaacactatttgacatctcatgaattagtaatttcagtggattatgctttctccttttagtgatgtcatagctctgtgaagatggctttttggcaattgctgtgattaaaaaaacaagtattatggaaaaattaatgtggaataggaaatgagggttggtgtccagtctgatttcaaggctcgagaatttatgcctgatctatcaggtgtaaatatggttaagggtgatataaaatattgttagtttttcaaatgcctattgagttgtcagggcataactacttaataaaaagggctgttagacatttgttttgacccggagtcattgtaaatcaagaaaaatttggaagcttggatatatggtctctataggtggcatacctgagtgctaagaagaagcactcaaagtattctgttattcaaatcggatttttctttttctttttctttttttttttttgtttttttttttttttgtttttttgacactgggcctcaccctgtcacccaggctggagtgcaatggtgccatctcggctcactgcagcctccgcctcccaggttcaagtgattcttctgcctcagcctcccgagtagctgggattacaggcactcaccaccaagcctggctaatttttttttttttttttgtacctttaatggagacggggtttcaccatgttggccaggatggtctagactcctgacctcgtgatccgcctgccttggcctcccaatgtgccaggattataggcatgagccaccatgcccgggcaaatttttacttttcttgggacaaatttttctaagttttttttaaggaaataaaacttctagtagatagaaggggaaacaggaaattgatcttctgaaagctaggtggttgatatgcccaaaagttttgaaatagactatctaaaccaaaaggaatcacttgggttcagctatttcagtaaaggataattgaatacttattgcatgttggagacacaacactgaacagagaggcatgtgtttgcaggaatcatggaaagaatcattttgacatagcaacttggctttctaaacccttgtgagtcccatatctggctgaatttgattttcaaaggaggtatttagtgcagagctttgcaagctcctcttcctaataaatcacattggtgttagatatatgctgtcactagaacgactttattactgagaatgattcttctgcatacagacttcagacaggtaccctttgtctcaaagacaccttagccaacaggttttttttgttttgttttgtttttaaactcatgagtagaactctgtgaatctacttgtctttgcgtcgttattaaccagaatgttcttacttagtgatattatttccttctcccggttttattatctttcatgttgtataagcaacatcacatgttttattatttaaaagaatcacactggcctttaaaaacagaagaaaagaattagcaggtgaatagcaaacatgactctttgtccccaagagcatgaagctcttatttcttactttgtattaattggtcagatattcattttaaatgtcctgtgtctcccaaattacctactgatattagctcaaatagaagccatttgtatctataaggagtccctaatttatttccttctttttttccttgtctccatactcattttttatttgttacctttttcactttctctttttcctgtgccttttttcctatgaatgttatgaaggacaggaaggaaggataaagggagtgaaggaatgaatgaacaaatgaaggagggaaggaaaggagaagaaaggtagattattgagtgaggtttctattcgcatcctttctcctgcttggccgagtatactttacttctccaaaactcaatatttaggtctgcattatgatgacagtgaaatgggctctgaggacagttgtaaagagtgaatgaggtcatacacataaagcacatgacgtggttcctgacacagagaaagagctcaaaagccatagctgcaattattaatgttaataattgtaaggccgggtgtggtggctcatgcctgtaatccaagcagtttgggaggccaaggtgggcggatctcaaggtcaggggttcaagaccagcctgagcaacatggtgaaaccgcgtctctactaaaaatacaaaaattagctggacgtcccagctactcaggaggctgaggcaggagaatcgcttgaacccaggaggtggaggttgcagtgagctgaaattgcaccattgcgctccagcctgggagacagtgtgagactgtctcaaaaaaaaaaaaaaaaaaaaaaaaaaaaaaaagaatgaggttgtatacataaagcacatgacgtggttcctgacacagagaaagagttcaaaagccatagctgcaattattaatgctaataattgtagtgatggtcgctgaaaccagcagttcattttcagtgtttcttctgcttcacttagcagcagcatttaacacagtcgatctcgccctctccttgattttcttggctgccaggatactgaggcctgttggtttcattcctctcacgagcctcttctcagccttcttttggttcccgctcagttcttccagcctacatgctccaggcacagtgcttattgctactttctcctctatccacatttattcccagggatggtgtgatctggtccaggcccatttctttcaattccatctacatgttgacagcccccagatgtgtatctccaggacagacctctttcctgaagctcagacttgtgcatcaaattgcctccctgcatctctgcctggatgtctaatgggcatctcagacttctcttgtccaaagttcagctcctcaactacctccccaactggttcttccctcagccacccccagtgtgttcgagagcaaaaccctccttctcactgcacagatcagcagcttgaagtcatccttgaagactctttctctcttaaccctcaacaagtgaattagtcaatcctcgtggctctacctccagatatgccgactctgacacacacacacacacaccctacccactggtctggtcacatgaacactacactagcctcctaactagtctccctgcctctttgacaccccttcccctataatctgttttcagcacaacagccagagtgatttgtttaaaatgcatgttagctcatgtttctcctctgctcagtcctctggtggcttccattttctccaagtagaagctagttccttagaaaaaacccatgtctctttcctttcattcatgtgtctccagcctggacaacctccttacaactcctgagacaagcaggcactctcctgcctctacaactttgcactggttgtatcatctgcttgggacatttttccctagatatctgcacatccaactatctcatctcctttaagtctgcccacttgtcactttctctgtaacatctaccatgatgacccaccacgcccagccagtaatattaatttctattgatcttgtcatcagatttatttttctctcctctccactaactctagttctgtccattgactctggttctaaaactccaaatgcttctcaatttgcttaattttttttcccatagtaattttccttactactttcttacatactttataatttacttatttatagtgttcattgttcctctccaatagaccgtttgcacacagggatggggatctttgtagcttattcactgattaagtcctaaatactcataacagggcccagcacaaagtaaatattcaataaatatctgctgaatgaatcattatcatcatcatcatcattacttttatctcatttgtgtgaactgcttatttttacctatattttccatggagtatgttatctggctagtggtatttgtattgaatagctatggtttttgacagttaactagactaaatatccttttattctgggtggcctgtgatttgataacagaattgtatctgactgaagaaccagtatggatcctgcaatttgggagaatgttatttcacagatagaatttatttgttaaaatatgacaaataggttttgtgcagtttgattactttgttttcccttttcatttctcctgtgtctagaataagaagggaaaaccttacactcatgctagaaggatttaggctagtcttctgggaaagtcacctctgaggggtagtgcagcaaagccccactcaatcgagggctgtctttttaccctatgattgattattctattattctattttatggtggtgtgtggcctacaaatggcaaggaagtatgaagttttttggttgagcttttctctgattgtgtgtgcgtgtgtctgtgtgtgtttgaagatgcctttagaagatgttagctgtctactctaatggggttgggctttgtcagttcttaggagaagaggcctggttcccaacccgccagagccttctaccacccatgatggctcacccctgtgtgaaagaaaacgaagctacgctgcagagttttatgtgcctttgaacactcaggccatggaaatagcctttctcttggctaacagtgtggccctacattgcactgactcttctgctcccctccccaagatattctggtcaaatttcagcagcagccaggctctttgctaccaggggacttcccaatggctcgaagactccatacaaacagctgatatgtgtaatcaacaaaggaacatattgtggtgactcacttgcttagtttccagctgcacatccaggcaatattcagtcaatgaggagagaaagagaggggcagtgatggaagactgactgtatttaaatcacttgcctagaggaggttatcagaatgccaaaaaaaaggtgccgaaagtatattgccagcagacagcttagaaagaaaagtaattataatactctctaattcaaaatccttagtttattaacatgaaaatgagcaagtgctgaattccttcagaccccagtggcttggagaggagccagctctggggcctatgtgagtgaggatgtgttgctgtattttcctgtaggacagagtttttaatttatctattgtgtgcttagtaaaatgttcacatttgcagtatttcatttatttgtcttttcagcttcaggaaattaaagagaatgcagtggatgccttcaccaattgttctttatcttttaattttgactctgtgaatagccctcaagttgtcacaatgtcatttattacaaacagctgataactagttaaagtaattaataatattaatttctttcttcctttttttttgagacagagtctcacttgtccaggctggagtacagtggcgtgacctcggctcactgcaacctcgcctcctgggttctagcgattctcccacctcagcctcccgagtagctgggactacaggcatgcgccaccatgcccagctaatttttgtattcttagtagtgacagggtttcaccatgttggccaggttggtctcaaactcctgatctcaagtgatccacctgccttggcctcccaaagtgctgggattacaggcatgtgtgagccaccacgcccagccagtaatattaatttcttttgatccatcagacttgtttttctcttccctccactaagaattccttttaagtcatgccccttcaggtcaggagagcatttcagcagaatgccagcccacatcctctctccttagtccaccacatttctggatgctgtgcctgcagagggagcaggggaccatgaacttgtatgccagactcagggcctgggtgcccagctctgggctgacatgctccctgcttgcttttcttttctattcttttctttctttcttttgtgttcagactctggtgaccctcaggacactagctagaactgagcttccatttaagtctggatcctacgaaaatttcttagaaattcccaagcctcagctctctggacacaacccatcaaccagcaaaatggatccccacccagttacctgtatcaactcaccaaaaggcaggatgggctgtagaccagttacaggtttctttcattctgtgggtagatgtgtgtgtctctagcagcctttttggaaagaatgcttgtattctacagatgtctctgccttggcaattctgttcaactcaaaagtggtaatctatcatcctctgctgagaatttacccagcaagtgcctgaagaaaaaaagccatttagtttttgcttccacacatgaaatggctaactctttttaagtgaggcttggggatttaagagttggatatcagatacctggatttcatggaccagcaaaatgtaaaaaaaaaaccaccaccaccaccaccaccaacaacaaaaaagccccaaagttgtgtagtaacacaaagctgcaggttttaattttgctttgtcaatatgttaagaaaaccaaaacagaacaactggtatttattatctcatcatctcatagaaaaatgggcatcttaacactaaaatgtgggaaggtcattataggaataaaggataatcctttcagtgaaatacagtcatgctctgcataacgatgttccaatcaacaatgaaccgcatattcttatgcggtttttccataagattataatgaagctaaaatattccagccacctaggctgcagccatcctgacatgttagtgcaacacattactcacgtgtttgtggtgatgctggtgtaaacaaggctggcatcaacagtcatataaaagtatagcacacacaattatgtacagtacaaaatacttgatgataactatgttactggtttatgtactgtactatacttttatcattattttagagtgtactccatctacttattgaaaagaaaatttagctgtaacacagcctcaggcaggtccttcaggaggtgtccagaagaaggcattgctatcataggagatgacagctccatgcctgttattgcccctgaagaccttccagtgggacaagaggtggaggtagaagatggggatattgataatcctgaccctgtgtaggtctaggctaatgtgggtgtttgtgtcttcgtttttaacaaaaaagtttaaaaagtaaaataaaaaaattaaaaattttaaaagtagaaaaaagctaataaagatataaagaaaatatttttgtacagctgtacgatgtgtttatattttaagtcatgttactacagaagaatcaaaaggttaaaaaaattaaaagtttataaaagtcacagttagcttagatatttattattgaagaaatacattttaaaaaataaatttagtgtagcctaagtgtatagtgcttctaaagtgtacaggaatatcctaggccttcacattcactcaccgcttactcactaactcacctagggcaacttccagtcctgcaagctccattcatggtgagtgccctatacaggagttccatttttaatcttctataccatactttccgatatcttttctatgtttaggtatgtttagataaataaatacttaccattgtgttacagttgcctacagtattcagtagtcacatgctgtacaggtttgcagcctaggaacactgggctgtcccatatagccttggtgtgtagtaggctatgctatgtacacactctaggtgtgtgtaaatacactctatggtgttcacacaacaaccaaatcttgtaataacacatttttttagaacatagtatccctgttattaaatgacacacaaatatacttataactttatagaaaatactatacacactgattttcctcattttgccttggactggtgaaggtatgctgtcctagatgggctgctctgctattgacatttggtggcctcaggaacagttaacaggaagattcagtccacccactgctcaaatcctgtgacaagacagttggtggatgctttgcattcaacatactcaaaataccaaaacttgaattctcaagtagctcttttgaaaaagtgcctgaggtattgctagctgtatttgggttccttccctgtaagagggtccacatgcttaccccctcctctgttttcattcccttttcttcttttgtgtcttctgatacctttgttatattctttttattctgagaaataatagaaaaatataaggagaaaaataaggttttccagtgaatgcatctcatagggaatgcatagttaaaatcccaatgtagtaatttctagccttttttctataaacgcttttcacaaagtgaggatcattctacataactttttatcttgagccttcttccctatcatgtcattaccactttgtcatgtcataaaatattttttttttgagatggagttttgctcttgtcacccaggctggagtgcaatggcacagtctcggctcactgcaacctctgcctcctggattcaagtgattctcctgcctcagcctcctgagtagctgggattacaggtgcccaccaccatgcgcagctaatttttgtatttttagtagagatggggttttaccatgttggccaggctggtcttgaactcctgacctcaggcgatccacctgctacagcctcccaaagtactggtattagaggcatgagccaccacacctggctgaaaatattttatgaaaacttgatttcagtgactgaacagtattcaagtttagttttttttttctgtttcttgttgctttttttttttaaaccatcatctttgtgcatatcacaagttgtttctaggatgcatacatacaaatgcatgagtggttccaaggttacgagtattttaaagctatggatacctgtttgcaaatggccctcaaggagagttctattaatgcacatccccaccagcaatgtaccagtgctctcttccccttacctgctagttgttgctagagatgaacttttaaaaaaccttagccaacatgataacagaataaatgcaacctcttcttaatttgcaattctttcattaccaataagattttatagtcattcatattttcttctctgtgaatgactcaagacttttgcctccacttttgttttaaattgaagagtacatccttctccttattgatttgcaagaagtcttttcatagatggatattaacttttgtcattgttcacaaataattttctctgttatttgccttctgatttttatggtggttttgccatgtcaaagtttaaaaatgttgtgaagtcagatgatcagatattcttttcttggcttttgcgttgactactgttcctgaaaaggccttggttttcttattttcccttctttctacatcttattctcatctgtctcttcacttgtctcccccagtgtggtcctagagactgggagagaggtgggaggcatggccagggtcggggagtgggttgtgttcctgtctggcttctagtaactccaccattatattcagagaaaaatcttcttagtagtttccattatagttgccatcagttgtaacttcacaaataattgctggtgttatttggaccagtgactccctaggttagcagattggagagggctccctgcagccttcacgtttcatctcaagacggtgggctggaaggtccccccattccagcagcagtgatattctgcatggcagggcaggaggagtctgcttcctactacactgacattaggaaactattttcaaatgcctatgaggtccgatgctatttacaatgcatagaaatgagtttgacttctgtcatcagctgattttgtaattcactttgtttgcttttccttgtcataggatgtttccttagaagagggttttttttctcttgttcaggatgtggttatcagcagaggggtgtgtggtcagggaatgtggtggtagcgagtacacagaggaaagaatggcacagttccactgtcccccactcacctttcttcttgtgtgtggtcggtggctgtatgtgcacctaccatcatcacattacttagcaaacccagttgtcctgtggttccacttcatggaagaccctattctctgctctagcactgaaccctccagaagacattttaaagaatgctaaaatggggctaagctcataaattagccagcagtattatgttaaaaatcatccttgcttacttcccattgtctcttgactcttacaagtccaagagtatgcagagttttttgtttggggaacccagtagtgagaagcagtgtttttgatcctgttgtttgtttacaagatttgggggtccctagctttagtgctctggagctctcttaaaaaaatcagattcttggccagacgctgtgactcacgcctgtaatcccagcactttgggaggccgaggcaggtggatcacttgagctcaggagttcaagaccagcccaggcaacatggcaaaaccctgtgtctaccaaaaatacaaaacattagccaggcatggtggtgcatgcttgtggtcccagctactcaggaggctaaggtaggaggatcacttgagcccaggcagcggaggttgcagtgagctgcgattgcaccactgtactccaacctggatgacagagaccccatctcacaaaaacaagcaaacaaaaacatgagattcctggctctgtttctgaagtttctaactctgggtccagagtcagactcaggtatctgcatgttaacaagcacccaaggtgactcttatccacagtaaagtttgaggaccactgtcttagggaaccgccttcatttggctgaacgaactttagagcatcagcttttctaatcctacagtttccaaggacaagcagaaatccctatctgaccattttgatggaatcctcactcccaagaatacatgttcactgccctttctccacctcttttcctctctcctgtttcttctttccctctggctgcaaggtgccccacactcctgtggtctggaaggaatggagccatgtgcacacttaacttatttttcatgcattccagagagagggagttggagcaagagtgctataggcaagatacttctagttattttctaactaccttccatgcattcaaatcaccgattttaatggatgctaaagctactgctgggaagagggtaggagatggaaggaggaagaatcttggctaaatatcttgaagatggagcaattaatttagttttcccttagccagacattttttttttcttccagtctcatttcacttgtgggcatggtaatcttcactgttggcctgccattcattcttgtttttaaaatcatgcacaatatgttacgttagcaacactttgcacaaacagaaaataaggtttattgccgatatttttagctattgtcatttttgctgctctctctccttactttcatttaaaatgatgaactgcaaacaatccaaataatattttcaagctattttcagatcctggcgacaattgactactatgggtgctccccaggagactgcctgtcagtgtggaactaaagaacaacaatagcagatttgtaaccaaggggtagtctcaggaatgtgaatagcaaattagggggtgtaggtttggacatcagggactgggggatggttaacttattgacacacagggatgatgttgtttatttagaaagggagtcacagttcagttttcctttgaactttttcaaaagagctggcttccagacagagggaaatggaatacagctagagttgtctgttttcataaactttaaacttgctttgttgccagtcctgtttttaaaacttgccttaggaaaacataaggcgtgtttaatattctgctctgaatgatcttgatactcattttgatatgtttttggtccccattgattttgaaaacgctaaacaccacaaatacttgacattcggaagggcaagcgagggattaaaactcaatctctgcctcctgcttgacgtcatctttgaagagatgagaacgtacaagtaagcagaattcttatagttggaataaaacatgattagaacatttggagaaggagatgtgatatgactgagggaaatgtgaacaacatagaaataaacacatttgcctaacacttttcatatcttatgatgcattttataaattggtgcatgggcaatggcctgcctatgtatttatctcccaccctgtgtgttttccccaaatgtaaccatttatagacatacaaggacgtatgggagagcgagcaaaagcttgtacaaatcactaacaaccacgtgaatgcaggcggccctgcaaggacttcagagtggaattattgaaatcataggagacatttaggtaagaagggtgtaattaccgttattatttagtgattactggtgctgacagtgtgcttcattgaaaagacagaggaagaccctgaacctgctcagaagtcttaagacgaaaataagaccaaggcatcaagccatgacagaacccaagtcatagggagctggtggcatctggtttccagtttcaaaaactgttcctttggccccatgccagcctctctctgataggatgcttgggagacctagcaggcaagagagaatcaggaggaggaagaagactgcatgggatgctggaggagcaagggggaaggggctggaggtcagagggaggctcatctctccagtcccgggcatctgctgagctccttctttaatggggcagaagagtgtcccatgcttgtcatgattaagcaaagtctttccatcctttgggaaacagcctgcttccccccagtcactaacaagttgttcagaagccagcgtttccttcttgccccttctcctcttccctgtgacaatgtatgtctcactcttagttttacgtcctgctgccttgtgtttatgtcttatcttctccgtgagactagcagcattttaatataagggcacaccccatttattgttctatttctcagcagtgattcttctgaattgggacttttatcagactggattttggttccagcttgctgtgttcctttgggtgagtgatttaaccactctatgcctccgtttgtagcctatataaaatgaggatagtaatattgacttcatcctggctgccgtgagattaaatggaaagtacttaatatgtgctaaataatattaatttggcttttcctctatccctttgggcctcaccacacagtaagggtgcttactggacagtttatattcttactaaatgaataacccaaactatgccaacccaaacaaccatattaaccatgaggttaaatcgtgtgtttgtgtgggtgctgatgtgcttttaacctgtgcgtgacacaggtacacacaaggttgtccctcctgggtttccttagggagcagaatccactcctagcatttattatctacgtgcactacctagtcatagcccctggctaagaagaagctaacagattgacctagctattacaacgtgtaagtgatagatccagaatttgaattcaggacagtctataactcccagctcactttcaccttcacgactcatggaacatctcaagtgtttgctgggtgagtgctaagtaatcattctcatccaaatgtggcttttcccactgatactgatttctttgtttatttatgctctcctgtctattttcctcatattccagaggtgactgagctgcccaacatggtggccatcagccacttgtggccacttaaaattcacatttaatttaattaaaattaaaccaaattaaaaattcaattccttagttgcaccaaccaaatttcaagtgttttaataatcccattagctggtgacaaccatgtcagcacaaatatataatattttcatcattgaataaagttctgttggacattgtttctccagaggatgtttcaaataagtgacagtcaagatgccaagtttttatttttatttttaatatgtatggttatagccttagaattttataatttatgagacttgaatcaataaccagttggtagaagaatggtaaatagttatactataggaatattaagtttttatttagttgactttatcctatgcattgggctctatgcaaagtgctttccaggagttgcctcatgtaattgtcatggcagccctgtgagacaggagctatcactagtccctttgtatagggctggaaaactacttgcccaagtctcaaaactgttcagtgaaaaaacgaagacctaacaccaattcattagactccagagctataggcttagccattgaaccacctccctctgagagtcccagcatattctcaaaaagtaagagccatcagtaattattctaaaagcacaggctgcagaattctctgttctaaatttaaatggaactgggccatattggatgaaagaaatcaggttcttttcatgagtgcttgtcaagtgcctctgattcctaaaagaaaccaatttggccactgatctgaagtttctttctaggctttacaagtcatctctaatcctataatttgtctttatttctaccaactaagatgtgtgcactccaccaaaaaagatcatctaatgtttgaaagtggatcagaagcaaattatatgagaaactggtttgtgtcattaaagctttgaaaactagtgatcttaatgaaagtaaaatcaaccctaccatgtacaggaagcctaatagttgtttgtaaggaatttcaaggagtctactgagatttccccctccatcctctctatatctaatatatctagctcctgttcacaaggatgtgcttgaaagatgtaaatatgtgttataaatgtttttttccctacaaaaggtcatttaaaagttttaggttgtaggaatacagctaccgagggaggtgaaatatctctacaacacgaattacaaaacgctgctgaaagaaatcagagacaacaacaaacaaatgggaaaacactttatgctcatggatgggaagaatcaatgttgttaaaatggccatactgcccaaagcaatttatagattcagtgccatccctatcaaactactaatgtcatttttcacagaactagaataaactattctaaaattttcatggaaccaaaaatgagtctgaatagccaaagcaatcttaagccgaaagaataaagcccgagacatcacactacatcacactgtagtatagacttcaaactaaacctcaaggctgcagtaaccaaaacagcatggtactggtacaaaagcagacacagaccaatggaacaggtcagagaacctagaaataaagccacacacctacaaccatctgatcttcaaccaagtcaacaataacaagcaatggggaaaggactccctattcaaaaataaatggtgctgggataattggctatctgcatgcaaaagattgaaaccaggccctttcttttcaccatacacaaaaatcaactcaagatggattaaagacttaaaagtaaaacctaaaattgtgaaaaccctagaagaaaacctaagaaataaccattctggacataggccttgggaaagaatttgtgatgaaaactctcaaaagcaattgcaacaaaaacattgacaagtgggacctaactaaactgaagagcttctgcacagcaaaagaagttatcaacaaagtaaacagacagaatgggagaaaatatttgcaaactgtgcatctgacgaagtctaatgtccagggaatctataaggaacttaaacttaaggaacttaaaccactccattaaaaaatgaacagaggacatgaacagacacttctcaaaaaaagacatgtgcatggccaacaagcatatgaaaaaatgctcaacatcactaatgattacagaaatgtaaatcaaaaccactatgagataccatctcaccagtcagaatggctgtcattaaaaagtttaaaaataacagatgttaggttgcagaggaaaagggagtgcttatacactgctggtctgaaagtagtttagccactgtggaaagcagttggagatttctcagagaacttagaacagaactactattcaacccagcaatcaaagtactgaaagtatacccaaaagaatataaatcattctgccaaaaagacacatgctttcatgagtgctccttttcacaagagcaaagacatggaatcaatgtagatgcctgtaaatggtggattggataaagaaaatgtggtacatacacatcatggaatactacatagccataaaaagaatgaaatcacatcctttgcagcaacatggatgcagctggaagccattatcctaagcaaattaatataggaacagaaaaccaaatcctacatgttttcatttataagtgggagctaaacattgagtacacatggacacaaagaggggaacgatagacaccggggcttatatgagggtggagggtgggaggagggtgaggatcacaaaactatccacctggtattgtgctcactacttgggtaatgaaataattcgtacaccaaacgccagtgacatgcaatttactcatgtaacaaacttgcacatgtaccccctgaacttaaattaaaagttggaagaaaaaaaaaggataaaaaaataaataaaagttttaggttggacaaggtgccacagagtttatttgtattaacctacatgtgattcattttatccatttggagctagaatttacttataagaattttacaggcctaatcctactcaaacaaactaaatgtaaaagtagtttctagattcttgggtggtattacatttttttaaggataactagtgtccctacaattggaatggtggccaccttttgttattcacatgtttagttttggacaaaagtattcctgaaagcatcttgctcagcgctggccacatagtgaaggttcaataaccgttgactatcctcctaccaggttttgattggaatgacctaaaatccccctacaattatcccatctttgtaaggtctcattttcttttcaatatttaggaagaaggtgccacatgaaaagctatcaagtttaaaccttgttcataccttcacactgatgttgtatcatgagtgtcacccaagcgccaagttgcaaaatgtcggcaagctcacagtagagcacaaaggaaagtgatggttagataatgaaacaagggctttgggatgtaagcagagatactaacagagagccgcatttgtttgtagcacttttaactactcaaggaatcttgaggtgacttaatttgtagttcagacccctacctctacccctagttaatcacaggggtgatgaaaaatactacatgctgtctttcttttcctaagctctctttaatcttgatctttgaaaagcaagtggtttttcttgtgcaaacagcttcatagaaatgtcaaatctggcacccacagtctatgctgaagggggagacttggtacaaaaggctcagtgctcagggcccaggctttgaaatgactccagctgtattgccaatgcaaatgcaggaggggaaaaattactggaacaaattgaaaggttattcagactggaatttagaatctcaataaaaaaggcttttataagccaaagccttggagtaaccggatcatttaaaaatacatcttttctgcattaaatgtggtgtgacagccacattagaaatgctgcagtttaagtatgttccttaaacatttttaactgacttgtaaggacagctaaaaccttctattggggggacactggatccccagttcatacatagtttccatttctttatttttccctcttttttttaatacctggctaataggtttttgccttttccctgtgttgattgctgcaggctcagggatctctgtgagctgcatgtcttgataaaaatttgttgagctagtcattttcttttttgacttgccagagaacagtcttcctgatcactcagacgttggtgataggaacagcacagctgtacgggggtggaatccctttaacaagaggtgtttaggccaagagacacaaatattaatataccccatctaacatgaggcagtgtcacagatgtgggactccttcctattgtttaaaatctgttatttcatgatcttttgaaagatatgatccaagtccagttgttcttggtgtgcattgcagttttccacccctacctccctcctacccaacaccattacttccttgacccaaaaaggagattctctaccccccacccccatttctacagggaaacaaccctgtagagagtggagagtgcattgaagtcaaagtaatggactttcctggggggctttctgcattctctgagctctgctgggtacagagctactgtggaccatggagtgtagctggcccagcccctgcactgtcatctgcacgggtcttcctgcctgattatttccaaaaatggctcagtctccaaaagattaagttcattgtttttaatttgtgaaatatttcaaatgtactgaatacccactatctggatttagcaaatattcacattttgccatatcaatttcaattctttggccttattttaaatcctcacttcctttctccttctctaggggtcacattatttcctttcccagcaaagttagctcttggtgctgccaaattatattgtttgtgtcagtgtcttaggagttatatcattgaactagaattataaggtaacttatctgtagcctattctagattcctcacttgttgagaagaaaaacttggcctttgtaaagacgttgtccccagcccctggtaacatgccagtgctgcaattggttctcacaggttttttcttgttgttctgatttgctcctttgtttgttttgagtgaagggatgacttcacagtagaaaaatccaaggactcaagggttatagataacacattgacagactttcttcttattgaggttcaatatttttaatgagtattttagcacaggattgtagagttatttaattcaacagtttgggcctcccaatgttcctataactaaaagctttgaattaaccctgtttgatatctgatataattatagcataatagggcatcttcctggttagaagagtataagttgcttcaaataatgtgctgatcctaacttaatgagttttgatttgctatgcggatatgtgtctgaagcctattgtcttgttcatactagaaagcagacttggtctgagacaagcacttcagtgatactgactctcatgcctcataaagtgatgatggagatgctatgcatggcccctcttctcctcgtatagttctcataaaacaatagaatgatctgttccggcttctgtgctcctttgaggcagtatcactagcccatatgttttaagaaccatcttgttcacacaccataaggccaaatcaactggagcctcattcccacattgaagtccagttcttccatggatccagcattcctttgactagaagcatttgcgtgaagacccagcagtgcactattttgatgtatccaagtaaagtcatcttttaacataaggagataccttcttgcactttcttcagctgagatggagtttggggatggccatgcatcctgttctcttctggggatcaacatttcaatagaaggttagcctaggggctttatcccaacattttcttcccaaagtcgtggcagttcttaacagtgttgttcacataacattaacaatgcatgaagccaccatgccaatgcttgcctagggttatgcctcagtcacccctttccctttcattcaggaacatcctttagaatgcaagtggatggctgacatattagtagaatgattaacatctgtctttatttattaaaaatggtatctatcctcaggctttggtgcttggactttcatgagtgacatgttgccattgagaccagctgtccttgaataacaacacctcagtagactgtaccttttactgaagtgctatgagtttgcttctcttcaaaaatgatcttgtaactggttgccaaggccattgtgagaatcgatgctctccagctttaggccctcactctcagggtgaggagcagtgggaggctgcgtgataacatttaaagctcacagagggaaacatttttgcactgactgtgccagaatcccatgctttgtggccaatataatggatttcatttggggccctgcataggccaattgtcatgatatggttgggaaactttccatcagctactgtgagatccatcactctgttccctacctctgtttctggcttctccattcctggtcacattttatgaagcagccaaccatccagattgggatttcatgctctgctgcacttctgcccaagttatttctcttacaaaggcctcctttacaaaatccttaatctaagtaatgcgtagaaggcgtattaatgggtagcaagtgaaagaaggcaagagccagctacttcctgaaaattattgtcattagagcatttccatgaaggccgaacaattcattagggtgagtccaggcaaaagccccatcccccaaaacatatgtaatgaattcagatctaattggccatggtccagtctagttctaagggtcattcttggcattttggaggtcagaagaaaggtttgatttgaagtttgttatgtttcccacatgttatatttaagtttgttcattatgttcattggatgttcccattggcttttagttctggacaaaggttaggtaaattattcaaccctggctcatcctgccatcaatccgatgcctcagtgcaaaagacattcacacccatgtcccagtacacgaaagggattcacagggcaacctaggatttgagtgggaaggaggccttgaatgagagtgatggtttcagattgacattggttttgttggctggaaagagatcctgattcttttatctgtggaattttctttgtagtcccagtatcagagtgtggctaatgtctccaaagctttaccgagaagctgtatgatgataaagcctttgagtaaggctgtccataggcttttgctgactgttgaatttccatggtctgctcatccaagaatttcactatgtggggtagcttgaaggagagggagattctggggaaatgacggcctgagtttttatttgcttgtttcacttcagcagaggagtgagaaaagtaagtggcacattgagtttgtgtatagaaggagctgtttatctgatggaaaggcccttccaaatcctgttttcattctcttttgctgttggagttagaccccatttataataattaagacttggttatgtgactttaagtccacctgtatccacagagaggctagagatgtgcattgtttaaagctttcaagtgctgaacaatgaatgaaggttatggtctggcaaggtaattgtttatttgaagccaaagtcagagatgtgggagacataatttaaagaactcaggggccttatattcctggcctcgagtcgatcaaagaacatataaaaccatccagtgaaacttttctggatttctaactgaataatccattctaattcactggtctttaatctctgagaatgagaagtagctgagtggtatcacatgatatatacaaaggtgttatcgaatttgatggcaggcgaaaactgttttgcctgcatgttctaatgaaacatggaagtttcaagtcagtgagataaattttaaggtttagattactagctgtgtggcccactctgtagagctaccaaagacaaagtgacagaaaaataaccctaataaacacttcttcgaaaggatggagttgaacaggatccttttggttggagaccttgtgattactgccaaattggttgtttataataggtaaatgttgattgagcagagacaaagctggaatcttagcattgaatacccccagccttggcccaagtatgcaggaggtagagagttgggctatttggaaaagagacagataattaaatcttttagaggagaatgcttttgaatgcatatttgtaagttaagccataatttaaatgctcaaatcctaggcggctccagaatttcctccaacacctgaattcatggtggaggggtgagaccctgacaagccttgacagtcttttaggcattcatttatttttcgccagaccagtttggttttgacttaaatcttgggtcttaagtttttctctttttctgtaaccctattgattgaaaagacaatttttttttcttttggttttccactaattctggtatgataaggtgaggccaattttaaataactattttttacatctgcttatcaaccctaaaacctaattctatacccatcttcatctttttttttttttttcaagatggagtcttgctctgtcacctaggctagagtgcaatgactcaatgtcggctcactgcaacctccacttcctgggttcaagcaattctcccgcctcagcctcccaactgactgggactacaggtgcacaccaccatgcctgactaattttttttttgtatttttagtagagatggagtttcaccatattggccaggctggtctcgaactgctgacctcaagtgatccgcctgccttggcgtcccaaagtgctaggattacaggtgtgagccaccgcacccagccttcatttttaaactccagctgcagactgcttaaagtcctctctctctctctttttttttttcttaaagagagggtctccctctgttgcccaggctggagggcagtggcatgatctcgattcactaaagccttagcctcctgggttcaagtgatcctcccactcagcctcccgagtagttgggactgcaggtgtacatcaccatgctgggctaatttttaaatttttttgtagagacagggtctcactatgttacctagacttgtctcgaactcctggactcaagtgatccttctgccttggaagtcttatcttttaaaatccatcacttgccaggcatggtggctcacacctgtcatcacagaattttgggaggccaaagtgggatggttgcttgtgaccagtagttcaagaccagcctgggtagcatagcgagaccctatccatacaaaaaaatttgaaaattagctggaaatgatggcatgtgcctgtgggtccagctactcagaaggctgaggtgggaggattacttgatcctaggagtttgagtctgcagtgagccatggattgccactgcactctagcctgcatgaaagagcaagaccctgtctctaaaataaaaataaaatcagtcgcctaccacctggtagaggtattattttccaaaacaacaacaacaaaagtcttttgttttcacacacgcacacagggagagaggtgggagtcaaaaatcagagaatcgactcattcatttgctaaatattcatttgttcatgcattgagcaagtatttgtggagcacctattgtgtaccaggcattgaattagcacctatgaatagcacaggtgaacagtggttactgagaagtcaggaaataaataagcaaaccccaaataaaatacttaatggcaaattgtggtaagtatgatgaagggaaaatcaatgtcttgaagaaatatttgtattaacgaggctaggctgacctgtgttgccataacaataataatgaatatgaaatctaaatgacttaacaaaaatgaagatttatttcttctcacattccaatatgatgcagattgaatagttctattgggatttgaggatccagtgtccttctgtcattggtgccaccaactttaacgtgcggtcttgacagttgtggcaagcgggagagaaagattgaggcaaattgcacaggcaggtttttagccagctgggaagtgggtatatcatttctgttcatattccattgtccagaatttagccacatggacccaccaacatgactaccaggaaaactgggaaacacagtcctcctgagtacataagaagagaaaatgggattggtgaacagcttgattttaatggaagatttcatttagaccagaggctccaagagcctctccctatagaaatgatttttaactggtaattagaatattaattgttagccacattgagtgtagtgggaatacattacattttaagtatgtttagagaccttacaaccattactatagatttgctaccagttaggaggatattacttagaatatttaattaaatctccttacctacaattgaaaatgttaaaaagtcagaggcccagctgaggaggcaatttaattacaatctgggtaaactgaacaaccagtgtcactgtcattcatctgtggctatgtagcatattttgatagaaggtaattgaacttttgccatcaaataacaaacaggggagaggctgtttgattggtgagcaaaggccaaactttggactcacagagggctgaactcttatcctaattgtgccataaaataacgtgatttttctcaagccagcttacctctctgagccagctttctctcgcataaaaaaggagagtaatagccactgttcactgggtaccatgtacgtaagactgtgcctcagcgctccacattgccttactaaatgacataaagtgaacagcacacacacaaaagacctattgcaccagttaggataagccaacttcaaacatctgtcacccggagacagagcagttctggagctggctaattcagcagctcaaagtaatttttatagcgatactctctgccattcttaacatgtaaacaatgacactatcatagtctcaggtgatggcagcagtttgaggagacaccagtggattttctgtatctctttttatcttataaaagagggagttcttccctacccccacacaggcacctctgtagatcccattggccagaaatgggtcacatgtttatgccagaaccaatcattggcaaaacagatgggattaccatgattaacatagaccaatcgtgattccacactgggacttgggaggaagccacatctctgaacatagaagagtggatatctggacaaagttgggactctgggaaaaaggagaaatagggatgatgttaggtagacagttggcagtacctgcccttcctcatctgctgctaccagaccacgtaagctctctgacatgcttgccacttggagtagctccctcatagctttctgcagataaatataaaatgcctaaagctagataaaggttgtcttcctcccctccctcccttccctttaaatgctatatggtgaatattaaacttatcaaatacagcctgtgttttaatgcaagaaataatagagacaattttgagtaggaggaggagctgccatggggagaaggcctactattataagagggctctagacagcctggttaaaattctaactctacaacttacttgttaggtgacctcaggcaagagtataaagctctcaatgccagtttcttcatctgtaaaaatggagattatcatcttgataaagcctacctgtattcatttcctgtttatgttgtaacaaattactacaaatgtagtggcttaaacaactccatttactatctgacagttcttggagtcagagatcagatgaaggtctcactgggttaaagtcaaggtgtcagctgaactgtattcctttctggagacgcaaggagagtaatatggtttggctgtgtccccacccatcttgaattgtaactcccacaattcctatgcgttgtgggagggacctggtgggaagtagttgaatcatggggtcaggcctttcctgtgcaattctcatgatagtgaataagtctctcgagatctgatggttttataagggggattttccctgcacaagctccattctcttgtctgccaccacgtgagatgtgcctttcaccttccaccatgattgtgaggcctctccagccacgtggaactgagagtctattaaacctctttattttgtaaattgcccagtcttgggtatgtctttatcagaagcatgtaaacggactaatacaaagagaatgtgttttcttgccttttccattttccagaggctgtctgaatttcttggcccattgccccttccatctgcaaagcccagccacagccggcttagtctatcttgcacggcagcactaactctgaaactctcttccactttaaacaaccctgtggttgcattggtcccatgggataactggccctattttaacatcatctgattagcaatcttaattccatctgcaaccttaattcccctttgtcatataacatcacataatcacaaactcctagacatcatggggacaggggtaggggaacatagtattctgcccaccatactactcataggaatgttgtgatgattaggtgagaagactcctgtaatggcttagaacagtgccagtcacataagcaaatgttcagtaattgttctttgtgaccccattatgtcttatcatttaatgagtttgttttatacaggaacaggctattgggagttctgtcttgaggaagcatctgatgctactttgctcactgctagaagtgatgatagaaggacagagatcttagtgagagccaactccttcttgctttctaaagccaaagctcaaggtctgagctctctttggaattaggtgattctccacagaaaacgtgtggtttgggcaaagccaattttatgagtaacaagaatgaaataaactggggaagatccaagcagataacattatcctcacataaaagtggccaatagaaagaagttaagagccacccttccctggatcacgttgtatagcctgtgtaagagaaggagtgctgtatgtagttaagataatggaccctggagttgaaattcctcttttcttctcattatctggatgacctcaagccttagcttccccatttgtaagatgtggataaaaatagtttctaccgcaggatgagatgaggtctggaaagttcacacaacgtaagtgcttggcacaaggagggcctggcagaaactgctaggtcagagataactctgggagggttcatacacagtaagggtctcattgcaaataattaaagttgagagagccactctcctgcctggctggggctaaggagtctgtagccttagagtattatgttcaaaattctactctcatgcagttaaatcttagcctgaatgtttattccattaaactttccctccagattgcatcatatgtaattacaagatgaaaatattgtgtggagaatgtagccattgttcaagtttcacatatgtgatgatggtttttgaatcttcttggtggggaggaggttagatttgttggttgaggtggattgtgacaagtgagcagagggacagacagcagaaagctgggatttcttggttggaaagaaatatgttgcaggtcctggactccacaggagttatatcttgtcttgggttgttttcatcccacagcaggaataactaaagataaagacaaagatgatgaaagacaagatgatattttgatgtcactgggcctggaaacaagggcgctattgtttgcaggcagcctgtattcatctgtgagagattagcaatggcattaatttattcaagattacagttcagaagcaaagtcatcaaaactgaagctctttcatttatggagcacgttgtacctctgggatggagggcgagtgctctggggccggggtatccttcagcgtgagttgtcttaacaggatgttttactcagagaacaagccttaggattcagctttttcagtcctgtagccactctcaggattccttcatggacttgatataccccaagactcttcagattcccaatggtgagagcaatggccgtgcttggaaagtggaaattggtaaggtcagtgggtttcacttagagctactgtgattcagcccaactcttccaacttgtttcgtatgtttacactcttgacaaaaattttacaatcatagactatttcctcactagaccacctctttgcctctggatcatgtacactcatggtcacgaggatgatggtagcactgtgttgaaggaaatgaaatcgatagcaaagagataactgcattcccatgcttatcgatgcctaattcacaatagcaaagtatagaaaccatctgagtgtccatcaacatgtggatgagtggatacagaaattgagttttagtgatataggaaaatccaaactcagtttctcttataatacttttacaacacagtacacttctgtgatcctggatgtctgagttttttctccacacaccaagcaatcaactgtccagcagattctccagtagatacgataccagctgggtttcctctaaatcaattcagttctgacactatctacctggagacaggttgaggactgtccctcaagactgcccctacttcagaggacagttgcaagtagtagattgtcacctatacttctgatcgaccagctgtgaattggggggttcccacaacctcatccttgagatctattaactttctagagtgggtcacagaactcagggaaacactttacttataataaatgtacacgtttattataaaggatattacaaaggatacagttcaacagccagatggtagagatgcacagggcaaggtatgggagaaggggcaccacggagctcccatgccctctctggatgcaccacactctaagaacctcccatgttcagctgtctgaaacctctcagaactcagtatttttgagactgagttttttatgaaggattcattatgtccacttgtttattaactcaacattcagctcccttcccctccccagaatatggggggggcagggggaggtagagaggaggcctgaaatttccagtcctctaatcagatggttggttcccttggcaaccagcctccatcctgaggctatctaggggccctcagccacaagtcatctcgttagcatacaaaagacactcctatcactggagatccaagtattttatgagctctgtgtcaggaaacagggaggaagaccaaatatatatttcacaatatcacagtagcagatatgtaatggaatattattcagccataaaaaagagggaaactctgccatttgtgacaacatggataaacttggaggacattatgctaagccaaacacagaaagacaaatatgtttcatctcacatatgaacaagtggttgccaggggctgggaagtaggggaattgaagtcatgttgatcagggtacaaacttgcagttagaagattaataagttctgggtatctaatatacagcagggatggcgatagatgtgttaattaatttgattgtaataatcattacaacatgtatatgtatatcaaatcatcacattgcgtatcttgaatatattcaatctttgtcaattatatattttaaaataaaaacacaaactttattttgaaataattttagactaacaagaaatgcaaaaataatactatgttcccatgtacgcttccccagtttgtcccctactgatacagtcttctataagtgcaaaccaaaaagcatgtaaacagatctcaaacagttgggaggtttattttgctaaggttgaggatacacccaggaaaaagagacacaggccacagtagtatgtgtggccgataccttttctgaagagggttttgagggcttcgatatgtaaaggggaaaagtgggcaagtggggaaagatgaaaaaaagagggaagatgtgttcacaatcttgtgaatccatatgttgcgtgtgaaaaggagggggtagacgttactgtcaattacgtattcatcttacactcagtaaatctgcactttacataagggaaaataaacagagtacaggaagctgtcaaatatacattcatctctgggtgggtgggggaggatttctggtctcctcctgtcctgtgtctatgagctgttaatttacattgttagggtggcccctgtcgagacatgagaagttctatctgtagctatcagtttaggaacaaaagtaaaggagtttttgggttttatttttggttttgtttttccatgtctcagcttccaagctaaacttttccctttgggcatagtgaatttggggtcccaagagtttatttgcctttcacatagcataataaattattttttaaaagactttatgtggagcatttcaaaaatgcatgtgataagggacgcaaaacttgtgtggcactttttttttttttttaacaagttccctctaccatgttaaatcatagcgtcaagacagaacctgccaggaccttcaagcctccttcatcatgcctccttctagtcattctgtcccctacagtaactacttttctgacttctatctccatgggttagttttacctgttattgcaccagaaccttatgtaacatactctctggtgtctggtttctttcactcagtgacatgtctttgagatgctgtgtgtgccaagggtttgtttttatcattgctgtgtagtactctggtatggacatatcattatttatctcatctagcatagatggatatgtagactctttccagttttagctatttcaaattatgctgctgtgaaaattcttccacatcttctgttgcacacttgtgtatacatttctattagggaatatccaggagtcgaattaccacctcaaaaggtatacatgtgttctgcattaagaaaattctgccaaacacctttccaaagtagtggtaacaaagagcattttagtttatctttgccaacgtttgcaatcccaaatgttcttaattttcaccattctggtgtgtgtgtctgtgtatgcgtgtgtgtgtgtggtgtgtgtgtggtgtgcatgtgtggtgtgtgtgtgtgtgtgtggtgtgtatgtgtgcgtgtgtgtgcatacattcgtgtgtgtggtgtgtgtagtgtgcatgtgtgtgtggtgtgtgcgtgtctggtgcgtgtgtatgcatgtgtggtgtgtgtggtgtgtgcgtgcgtgtgtgtggtgtgtgcatgtgtgcgtgtgcggtgtgtgtgtgcatgtgtggtgtggtgtgtgcaagcgtgtgtgtggtgtgtgtgcatgtgcgtgtgtggtgtgcgtgtgtgcgcatgtttgcgtgtgtgtggtgtgtgtgcgtgagtgtgtgtgtggtgtatgtgcgtgcgtgtgtgtggtgggtgtgtgtgcgtgtgtgtgttctgcatctgggtgttttagtatctaagtatcttaattcccatccctgtgatcactaatgttgatcagttttcatatgtatattagaaatgtatatgaaatacagatatttatttgtatattggctatgcctatgtattttttgtgaagtgttcaagatttttgacaatttaagaaatctcatgatatactttttttacttaatgatttatagtcattctttatgtattccagataccactcctttactggatatttagactgagaatatcttctcccaccctgtagtttgctcttcttttaatgctatcttttgatgaacagaagtttttaaaaattttggtaaagttcagtgtattgatcttttcctttatggacagtgctcttttatatacaatttaagacatatttccctgccccaatggtggatgatagtccacaatattatattttggaagcttaattattaagcttcactattaaactttattattaaaatccatctggaattaattatggcttatttttctccatatagttgatgcagcacgatttatggaagacagtttttcccattggattatagtagtactttttaaaaattaggttttttttttcttagatcctctgatgttatgctattggtctgtttatgtttgtactctgttttaattacttgagttttatgtaagtcctaatatctggtagtataagtcttccaatatcattttgattcttcaaaattgtctttgctcttcttggttctttatatttccatgcaaattttagagtcaatttattgatttctacaaaataatctgctgagactttgattgcgattgagttgaatgtaaaaatcaactgaagaaggattgacgtatctttataagattgagtcttccaatccattaacagtccatcccttcacttattttctttctgtaatattttgcagtttctgtgttggaagtcttacacatttttcctaaggtttattaccaggtatttaaaaggctttgctgcaattatataatatagagttttttaattttttattttctaatatttgaaagccatcaactttataatgatcttgtgtacaatgattttgccaagttcacttactgaaaagggttaatgatgactatatcttttttattttctgtgtatataatcatattgtgtttgaatagtgtctgctatatttctactttcccaatctatataccttttatttctttttcttaccaagttgcactggatttctttttttttttttttttatcttgttacaccaccagtacaatgttgaaagaataaggattagcacatattcttacctctttcatgatctcaggatgaatgcttttactagttttaccattaagtcttatgctgcttttgattttcatacatattctttttaaggttaaagaagtgctcttctgttcctagtgtggtaaaaatggatgtgaatggatgttgaattttgtcgagtgcttgtgcacctattaaaattatataattttttcttcttttttaatgtcatggattacattgtttgattttcaaatgataaaataactttacattcgtggtataaattcaactttgtcataatatattaaacttttatatttcactgcgtttgactttgtgcaattttaagatctttgtgtctgtgtcaagacagatactggtctgaaaatttcctttttgtaatgctgttttcagctttttttattagggtatgctggcctcaaaatgagttgggcagagtttcttctttttatactctctggaaggatttgtgtaagattgttacttcttccttaattgtatggaagaattcaatggtgaagccacaagggactgtagtttactttgagggaagatttttcgttatagattcaatcactttaatagatggaagactattctgactttaacatttcatcttgattcagttttagtaagttgtgctttttgaggaatgtgtccatttcctataatttttcatatttattggcctaaagttgtttataaagtccccttatttcctttttcacatgtaaaagatctgtagggcccttcttttttccatttccaatatgattaatttatgttttcactcattttttctaaatccatcttgcttaaggatttatcaattttatggattttcaagaagtaactttttggcattgtacatctgtttgctgtgtcatcgatttctattcttattttttatttcctttactccactttcttggggttaaatttgacctttttttagcttgttaaaatggaaccttagattattggtttccagccttacttttttattatatgtatttacagataccaacttccctgtagttgttttagtaatagtgcacttttagatatcatattttcattatcattgaactcaaactattttctaatttttattgtgaactttatttaaagtgtattatttaattctgaaacaatttgaataccaaattttctagttaaaattttatgatttttagtttattccactgacatgttgaataccttctatattatgtccatcctttcaaatacatttagacttgctttacagatgatcatacgatgtgttttggttaatgatccttgagcacttgtaaaaaaaaatgcattcagcagttgatgaatgcagtgttccatatatgtcaatgtgatcaaattgactaattgtaatattcagatctagtctctactgattgctgtatttgcttattctatcagttggaattccccactatgatattgtatttctctctgtctcattttagttctgcttaacatttcagctttttggtgttatatgttgttgtatgtgttattatcagtatacagatttaaggttgtcatattttcctgtcgaatcagctcttttattattacatctaaatacatagtatcacttataattacattgtgctttacatggtttgaaggtaaaaagaaaggacaagatatactaaaaaatagtggctattcaatgtaattattgtataatttaatcttacctataatcttgctatttttcttatctatgtttctagttgattaatctaaaaaaggcaaaatatttctattattcagttttgtcatctattagcttgttagtaaacattattttattatttacttcagtgattaccctagaggttataacatttattctcaatttaatattagagtctatattatattagcacttttcccacttatataatgtacataccttagaacagtttacctctatttaagctcacccgtccttggtgccatattaatcctccaagccatgattattgtcattttaaataggaaatatttaattagagtgactcatatggattttcccccattttctgtgttattaatgggatcatttttcatctgcctgaattatttctttaaattctgctgataaatgtgtctgaaaatattttaattttgctgtcattttaaagaatgtttttaatggggtacagaattccgaggcttacatttttttcagttctttaaagatatgttctgttgactgggcacggtggctcacacctgtaatcccagcactttgggaagccaaggcaggtggatcacctgaggtcaggagttcgagaccagcctggccaacatggtgaaaccccgtctctactaaaaatacaaaaattagccaggcgtggtggtaggcacctgtaatcccaactacttgggaggctgagaccagaggatcacttgaacccaggaggtggagtttgcagtgagccgagattgcaccactgcactccagcctgggcaacaaagagcaaaactccatctcaaaaaaaaaaaaaaaaagaaaagaaaaagatgggcttccctttgtgggtaattcgacctttctctctggctgccttaacattttttccttcatttcaaccttggtgaatctgacgtttatgtgtcttggggttgctcttctcgaggagtatctttgtggtggtctctgtatttcctgaatttgaatgttggcctgtcttgctaggttggggaagttctcctggctaatatcctgaagagtgttttccaacttggttccattctccttgtcactttcaggtacaccaatcaaatgtagatttggtcttttcacatagtcccatatttcttggaggcttgctttgttgctttttattcttttttctctaatcttgtcttcttgctttatttcattaagttggttttcaatcactgatatcctttctttcgcttgatgaattcagctattgaaacttgtgtatgcttcacgaagttctcatgctgtgtttttcacctccatcaggtcatttatgttctctacactggttattctagtaagcgattcgtctaaccttttttcaaggttcttagcttccttgcattgggttagaacatgctcctttagcttggaggagttggttattacccaccttctgaagcctacttctgtcaatttgtcaaacctattctctgtccagttttgttcccttgctggttaggagttgtgatcctttggaggagaagaggccttctggtttttggaattttcagcctttttgtgctggtttctccccatctttgtggagttatctacctttggtcttttatgttggtgaccttcggatggggtctttgaggggatgtgctattcctttctgtttgttagttttccttctgacagtcaggccgctcagctgccgccctgctggagtttgctggaggtccactcccgaccctgtttgcctgggtatcactagcagaggctgcagaacagcaaagattgctgcctggtctttcctctggaggcttcgtcccagaggggcacctgccagatgccagccagagctctcctgtatgaggtgtctgtcagcccctactgagaggtgtctcccagtcaggatacatgggggtcagggaccgacttgaggaggcagtctgacccttagcagagctcgaacgccgtactgggaggtctgctgctctcttcagagccatcaggcagggacactaaagtctgctgaagctgcacccatagccgccccctccgccaggtactctgtcccagagagatgggagttttatctataagtccctgactgaggctgctgcctttttttcagagatgccctgcccagagaggagaaatctggcagtctggccagagcagccttgctgagcagcagtgggctacacctagttcaaacttcccagtggctttgtttacactgtgagtgtaaaaccacctactcaagcctcagcaatggcggacgtccctcctcccaccaagctagagcatcccatttggatctcagactgctgctgtgctggcagtgagaatttcaagccagtggatcttagtttgttggctccatgggggtgggacctgctgagacagaccacttggctccctggcttcagcacccctttccaggggagtgaatggttctgtcttgctggcattccaggcgccactggggtatggaaaaaactcctacagctagttcggtgtctgcccaaatggctacccagttttgtgcttgaaacccagggccctggtggggtaggcaccggagggaatctcctggtttgtgggttgtgaaaatcataggacaagcacagtttctgtgccagagttcctcaggctcagtccctcatggtttcacttgggttggggagaaaattctctgacgccttgcacttccagggtgaggtgatgtcccactctgcttcggctcaccctccgtgggctgcacccactgtccaaccattctcagtgagatgaaccgagtacctcagttggaaatgcagaaatcacccaccttctgcgttgatctcactgggagctgcagaccgcagctgttcctattcagccatcttgcactatgaagaaactgcatcaactaacagacaaaacaaccagctagcatcataatgacaggatcaaattcacacataacaatattaaccttaaatgtaaatgggctaaatgccccaattaaaagacacagactggcaaattggataaagagtcaagacccatcagtgtgctgtattcaggagacccatctcacgtgcagacacacataggctgaaaatgaagggatggaggaatttttaccaaggaaatggaaagcaaaaaatggcaggagttgcaatcctaatgtctgataaaacagactttaaaccaacaaagattgaaagagacaaagaagggcattacataatggtaaagggatcagtgcagcaagaagagctaactatcctaaatatatatacacccaatacaggagcacccagattcataaagcaagttcttagagacctacaaagagacttagactcccacacaataatagtgggagactttaacactccactgtcaatattagacagatcaacgagactgaaaattaacaaggatattcaggacttgaactcacctctggaccaaggggacctaacagatatctacagaactctccatcccaaataaacagaatatacattcttttcagcgcctcactgcacttattctaaactggaccacataattggaagtaaaacactcctcagaaaatgcaaaagaatggaaataataacaaacagtctctcagaacacagtaccatcaaactctagaactcaggattaagaaactcactcaaaaccacacagctacatggaaactgaacagcctgctcctgaatgactactgggtaaataaggaaatgaaggcagaaacagagatgttctttgaaaccaatgagaatgaagacacaacataccagaatttctgggacacatttaaagcagtgtgtagagggaaatttatagcattaaatgcccacaagagaaagcaggaaagatctaaaattgacacgctaatatcaaaattgaactagagaagcaacagcaaacaaattcaaaatctagcagaagacaggatagaattaagatcagagcagaactgaaggagatacagacacgaaaaacacttcaaaaaattagtgaatccaggaactggtttttagaaaagatcaagaaaatagatagactcctagccagactaataagaaaagagagaagaatcaaatagatgcaataaaaaatgatataggggatatcaccactgaacccacagaaatacaaactaccatcagagaatactataaacacctctatgcaaataaactagaaaatctagaagaaatggataaatttcttgacacatataccctcccaagtctaaaccaggaagaagtcgaatccctgaataaaccaataacaagttccaaaattgaagtggtaattaatagcctaccaaccaaaagaagtccaggaccagacggattcacagccaaattctaccagaggtacaaagaggagctagtaccattccttctgaaactattccaatcaatagaaaaagagggaatcctccctaactcattttatgaggccagcatcatcctgataccaaaacctagcagagacacaacaaaaaatgaaaatttgaggtcaatattgctcattaacattgatgcaaaaatcttcaataaaaaactggcaaaccaaatctagcagcatatcaaaaagcttatccaccacaatcaagtcagcctcatacctgggatgcaaggttggttcaacatatgcaaatcaagaaatgggatccatcacaaaataaaaccaatcacaaaaaccacatgattatctcaatagatgcagaaaaggcctttgacaaaattcaacaccccttcatgcccaaagctcttaataaactgggtatcaatagaatgtatctcaaaataacgagagctatttatgacagacccacgtccaatatcatactgaatgggcaaaaactggaagcattcccttggacaaccagcacaagacaagggtgccttctctcaccactcctattcaacatagtattgggaattctggctagggcaatcaggcaagggaaagaaataaagggtattcatataggaagagaggaagtcaaatggtctctgtttgcagatgacatgattgtgtatttagaaaaccacatcgtctcagtggagtctccttaggctgataagcaacttcagcaaagtctcaggatacaaaatcaatgtgcagaaatcacaagcattcctatacaccaataatagacaaacagagagccaaatcatgagtgaactcccattcacaattgctactaagagaataaaatactcaggaatacaacttacaagggatgtgaaggacctcttcaagcagaactaaaaaccagcgctcaaggaaatcagagaggacacaaacaaatggaaaaatattccatgctcatggttaggaagaatcaatatggtgaaaatggccatgctgcccaaagtaatttatacattcagtgctatccccatcaagctaccactgactttattcacagaattggaaaaaactactttaaacttcatatgcaaccaaaaaagagcctacatagccaagacaatcctgggcaagaagagcaaggctggaggcatcacactacctgacttcaaactatactacaagactacagtaaccaaaacagcatggtgtactggtaccaaaacagagatatagaccaatggagcagaacagaggcctcggaaataacaccacacatctacaacaatctgatctttgagaaacctgacacaaacaagtaatggggaaaagattacctatttaataaatgttgttggtaaaactggctagccatatgcagaaaactgaaactggacccctcccttacaccttatacaaaaatcaactcaaggtggatcaaagacttaaacgtaaaacctagaaccataaaaatcctgtaaggaaacgtgggtaataccattcaggacatagacatgggcaaaggcttcatgtctaaaacaccaaaagcaatggcaacaaaagccaaaattgacaaatgggagctaattaaactaaagagcttctgcaaagcaaaagaaactatcgtcagagtgaacaggcaacctacagaatgggagaagatttttgcaatctatccagctgacaaagggctaatatccagaatctacaaagaactgaaatgtataagagaaaaacaaccccatcaaaaagtgggcaaaggatatgaacagacacttctcaaaagaagacatttatgcagccaacagacatatgaaaaaatgctcatcatcactgatcattagagaaatgcaaatcaaaaccacaatgagataccatctcacaccagttagaatggaggtcattaaaaagtcaggaaacaacagatgtgggagaggatgtggagaaataggaacgctcttacactgttggtgggagtgtaaattagtttaaccattgtggaagacagtgtggcaattcctcaaggatctagaactagaaatacgatttgacccagcaatcccattactgggtatatacccaaaagattataaatcattctgctataaagacacatgcacacatatgtttattgcagcactattcacaatagcaaagacttggaaccaacccaaatgtctatcaataatagactggataaagaaaatgtggcacatatacaccatggaatactatgcagccataaaacaggatgagttcatgtcctttgcagggacatggatgaagctagaaactatcattctcagcaaactatcacaaaaacagaaagccaaacactgcatgttctcactcataagtgggagttcaacaatgaaaacacatgggcatgaggaggggaacatcacacaccagggcctgtcagtggctggtgggggcagggaagggataacattaggagaaatacctaatgtaggtgacgggttgatgggtgtagcaaactaccatgacacatgtatagctatgtaacaaaactgcatgttctgcacatgtaccccagaacttcaagtatatattaaaaaaagatatgttctgtcattttagacctttcttacttcttttgagaagttcaattgttagtcttattgctttttagtatgtttttttctttagctgactttaagatttttatatactgtttagaatttgtattatgatatgtgtaagaatgttttcttttgcatttattttacttggagtgtgtatatcttcttgaatctatggccggaagtttgtcatcagttttgtaaaatttttgtctcacttcctccaaatatttcctttgccccattctttttttaaattctttaagaattccagttatgtatcagatcttttgaccagatcccatatttattttttgcttcttctttgttgtctagttttttctctatacagttcgacctggatatttctactgacttctccagttcattaatcttctcttcggtagtgtctaatcttctattaaatagatatgatgaattcttaattttaatcaatgttttcaattctaggaatttcatacaattcttttttatactttatcttttcatctgtttccttcaatattttgatcatggttattttagagtctgtgcctgtctgtaatatctggattacctgtaagtctattatctctttcctttttttatctcttgacttttagttatctggctctgtttcttggcatgcccaacaattcttgattgcttgcctgatggtgtatatgaaaaattgttgaggctttggatgttcttatcttcctcttagaaagaataaatcctgtggcgggcaaatagaatacaggcaaagtatcttgatctaattacaacttgtttatttataatttgtcctgactctgcaggcttagccatttcagaggtttcagctgaaagcttgtagtttctacatgtgctgtctcctccttggtgagggcttaactttaaattttgatttcccaccattttatgatggtcaggttctctgcttaacatttcagtcttttagctgctttctacttggttttattgagtcttaactaacacatacataacttagtcattatcaaatacattagggagaaattgtctgcagaacatggacttacttccctagagttcccttttcttctggatttttttctgtagcctgaacccatttttttggtcttcatcttctagtaaggctgccactaattctagattgctgtttcctgtttggctttcatgcccttccctatgatctctaactcctggcctcatgtgatccacccgcctcggcctcccaaagtgctgggattataggtgtgagccactgcacccagcctcatattcttccctattaattggcaaatgctatgagaggggaatgggagtgaatataggtctttactccttgtaattattttcagtataggatctggtggcaccttcaagccctcattgccctttttcttttttgtagtttatccaaccttaatagatagatgttctcagtattaggattcatctgacagtacatagtccatcatagctagaagcagaatttctccaattaatacttttaaatttattgtaagagttgctttattccaggagctgggctcgttggttctcactgattgtgcacagtcattgggtggtggcagacatctggatgcagctttgtcgatgaactagcacagaaatgccagctttcctccattcgagtgttatcaataagagtattgcttttgtctctgttcggtgggtcttcccagggtatgaagttctctgaatgctaattgttaatggtactctatgttttaaaaatcagtgtttatgggctgggcatggtggctcacgcctataatcccagcactttgggaggccatggtgggtggatcacgaggtcaggagattgagaccatcccgcctaacatgttgaaaccccatctctactaaaaatacaaaaaataagctgggcgtgatggcaggcgcctgtagtcccagttactcaggaggctaaggcaggagaatgccatgaacccaggaggcggagcttgcagtgagctgagatcacaccactgcactccaacctggacaacagagcaagactccatctcaaaaaaaaaaaaaaaaaaaaaaattagtgtttatggaggcctttttattttcatttaattttattattcttttaccaaatatgtattggaagtttagaaagccatagtcccacctgaaaaaatgtacactgcacattattagcatactaaaggcatagacctgcatctttgacacttacatgttcaactttgctgtccaggttcttagagcatagtaatgaacaagacacaaaatgtccactggggctactgaaattgcccagagaatccaccctggtggcacccatatccatgcaaagaagacacatttgtgaaactctgagttaaactagtctctgtggacaaccactgggccttacttctgcttccagtggtcactggctctgctggaaaggctagctagagcatgcagatatggaagcctaactaatggaaatggtcactttggagtgttttgcctcctttggggcaacaagttagattgaaacagaatctttctttctttctttcctttctttctttttgatggagtctcgctctgtcgcccaggctggagtgcagtggcgtgatcttggctcactgcaacctccgcctcctggactcaagcaattctcctgtctccacctaccaagtagctggaattacaggcacacaccaccacacctggctgatttttgtatttttaatagagatggggtttcacggtgttggtcaggctggtctcgaacttctgacctcaggtgatccacccgccttggcctccccaagtgctgggattacaggagtgagccactgtgcccgcccgaaacagaattatttaacatagcacagtgagtatgacttggtcatacattgcacagcttgcaacaagtgttgctgcattaccgaaacaaaattaatttaaattctctttaaacacatgttttgggttgattttctaatttgaaactgtcaagagatcaagtaacaatgtcatcataatgagaaagatggggaactgtgctttaaagactgtcagcccatttgatctaccacacagaactaggttggtaattaccctaaaaaagtcaacttgccaaaaaaagaatagtctgaagggtcagttagtgattgagtataaatccatcttgtgattttatgtagttataggtcgaaatgattgtatatataggcatagacacacatctgtatgtacatacttttttcaaattctcagactcacatttcctctaagtaattaggaaagatattatgcaaagtcatactgccttctgaaatggacacttaggatctttgacattttatacgaagcacactactattcctgttattggcatggataattgacacttgactgtatccttctcattcactaggttcttcagaccctcatacattgagctgtttttaaagactctatgtaccccaaaagttgttgatgaccacttgtgtacatttaagtgtcaaaaggaaaacaaaatgtaagcatgcttttccaggtcacagttatttacatcattggctctctcttcaaggtcacactgtgtgctgattttgcatttggtccagaacatgtctggggctcatcttggccctagaagagtcagaagtgtcatgatgaaagtaatagtgaaggatttgagagaattctgtctttactggggcagagtaaccctcatcttaaggaaatacctacaaattccacccttccaaaattttggttcttagcggcacccaggattctgtaactatgtgttaaaatgtctgagttctctgattttaaatgaggcatgactgttcaaaggcaggtaatgtcttctgtggagacaggtatttagacgaacacttcagaacaagcagaaacgtatagggcaatggcgtggatcaaaagcatcaccgtgtaattgaaactgactttgtattgggttccttcagtgtcaaggccctttttttcttctgagagcaacattttccctcttatcttcatttatgcctgtgcttccttaatcatcttcaaatgtttgtgggttgatgttcacatgtcctcattctgttttttaaatctcatttgttgccgtttttctcttacagggagaggaagtattctgtttaggctacgtgtttaagggtgaaaagtgtttatagaatcttcatctgtttcctttgagcctgatatatttgatgacatcactctgtaattttacatgatttggacagtgcgaagcacacagggcagaatgttcaggacgacaaagagaacatgtttttgtaattagccagggaacccaggctacaacttgtgatccttgttgaaaacacgcacatacacttacagatccaatgagagaagatggtccttgctaatgtgttctttggtggcccatgactgactttaagggctgtttggtttgaatgcttgtgtgtggacaagacacgggtctggggtgagagttcagcttttgaactctgggttaagaatttaatgggactaggtcattgataatagagattttggagacatttaaataaaatctcttcgtgtctggaatttggggatagcaatggaaggtcatattaattttgtgttaatgagtgttcagtgaataaatacatgcttaagccatttcccctgtgccttgttgttctttattgatttcccagtactttctcattctctcagtctgaagtgattattcagagcctccttaggaagtcccactgaatggctgagcacttctatttgagacaccattcactgactgctgacctttggggcatcatttcctaaggcttccacgttgtggtcatcagagttttatgtggaccctcgaaaaagtcaaaaggtcagagcacagaagaaagaattctgatgaagatttatgaaatgtcaaaaattaacaaatctaaaatctagtttaatttcagcaagaatgacagctttgagtggcttgtacttggacatcggtggaagtaaaactgatcagaacttctaaagtgggaactcactggggaccatccccacaggttctcccacggtaatgctttggcatctgtcctagcgagaagtcatttggtagaaacctcatgtttctgcctaggtgggacacttgcactttgagggccttggacgaatagatgggttaacccaagtgttgaacactacttaactatctcgggacttttgttctgtgttcatggatttagtaatcttaatgtaaacaggcacctcagcagctgtgtccccttaagcggattttatttagcagctgagttacccacgtcacttggcagtcatagattttcagtttttccttgtgccaagagggcagctggaatgatttgagtactcattaatttgggagaaatatgagctgtataaggcagacaacatgagttttctgtatggtgttgtaccaggataagcagatcagggtagaagcaatttgccctatcccaaaggggccctaggattttaataagctggttatgaaaattctatttctttgcaatttgaagcagctaattagagcctgtaatttctctcctgtaacgagagtggatgaaggttaacattaggcctcccgggccctttcacattcatttacagagagaaatcaggtaacagttgtagctaattagagcagggtattaaatatttagtccatcttgatttaacttagagaacacatgcatgttgttggggtatggaaaatgataaagggaagttaaatttaatttttaatcaaagataaacttaaaggcagtataataattgtagcactgactaccctaacctgacagccagagcagcagttgcctccagcggtctgaactgtcaagataaaggaagatgatgtcgatttaatttcatcagtgaacacgtagcccaagttcaaacagctgggatttatgccatctgcacaaagtacaaagaactcgatttttattgtagcagtgagattgaaaaaaaaaaagcaccttcttgatgtttcagaattcggagtttgactttggatgctatgagtgcatatcatttggataatagttttggggaactatcctaaggaagatatctcattcataggcatttttaaaagaggatttgtgtctggcgaaactgctccctggaaggaaatcgttgtccaagaggctgggcaggcttagcaacggggtagcattgtgttgagtaaagtctgactttgccataggctgatacctaaactgttgcatgctgaggacactaagtcattcttctcttgtcatacccaattcagatgatcttcctaaagcgggactcagttaagtcaggacatgcatatcagaaagaaattcaccccatgactccttttccctcagggcctcacacaagggtagagcatcttcgcagtgaagtcagttcacaggaaagctctcaggactactgcaacttccctggaagcaggcttttaggaggccagaataatataaaaagggcaaagatgtggggaaaagatgaaaaggcttataaaaatagaaagactctaaagagtaactctaaggcatgcatccctctaacttcactgatttatcttggtgcgtgacaccccatcactaccctggttgtttcatttggggatgctcgaagcatctttgcagatcggtaggaaataaatggcaactcacaaagaccatctgactttgctacattgtcttccagttgccagttattacaaaatggtttctgagggcagtaatcctttggaaatgcctgttattggggataataactggttgtcagagcattaacatcctcggcttcactctgggctattacataacaaaagaatgaactggtggtgagtctgccaggtgtgttaaattatatcatgcattatggaagttcggtgatggggattagcatccagaaaagactatcagaaattgccaaactcattatctgctgaagcaggagactggcctcaggcctagggatgcaaggtttgagtgtaaccattaaggcactacctccagtctttctctgccctagcgtggagacaggaagcacaccagcatttcttctctgttcttcagccgctaaagaagatcaaaaatactgtgttaaccagagtagcagcaaagctgtattgacaatgaatttacacatttcctggacttcttaatggcagaactgctgcttaggcagtcttctgtagtcacagaatttagtggattcccctagcacttttggggtctagattttgttccctggtgcccttaggacaatagagatggatggtgagccttcagaagccatgacctctgggaagctctgcccccatatctcagatacccacaatcactcctagcatttacacatcacattgagcacaggacacattttgggtcagaagttttccaaaggggtgaagcgtgaaatgcaatgaaggttgaagtcccttggaaataagctttgcactgcagacacacagataaatgaggacttgccagttctcagcagctctggatgacccttcgcattgctgttggtctaatccattgttgagatgaactgtggggatggtagtacttctaattaattttcagtagaacatctttatgcccatgagctccttttaatagcacatcacctctataatctatgcttctactcttaagcatctgtacttaagacatgcatgatgtgtttgctacctggatatcatctatatggagttggggattgggtcaccattatattcctagtacctcagagctgcacaggagatcctctgtaaatttttattaaatggaattgagtggaatttttttcttcaaaatacttttcttatagaaaacagcattacatgttaattctagaaaatttggaaaaaaaataaaaaaatagatactgggaaagaaacagggatcacttgttatccaccctcgagagattatggtactagacactttttgcatatatctttgcattatttttccatgcatgtatatatatatacatatatatatatgtatatatatacacatacatatatatatgtatatatatacacatacatatgtatgtatatatatatacatatatatgtatgtgtatatatatacatatatatgtatatatatacatatatatatgtatatatatacacacacacacacacacacacacagacacacataaatgggatcagactgtatatggggcattttgtaacctcttttgttcatttagtgatgtctttccaagtcattagcaatcggctttgccattatttgtgatggcttcatgaaagttcatgattaaatgtactataatttaatccccttctgtgatacgtttaggttgttgtaatttttctgtaatgtgaacagtactgcaacataaattctttctgctaaatcttcatttctttatatgattgtttccttgtgttgatttcctagaagtaggattgctgtgtcaaaggttatgcacatttaaaatatttaatagatgtggtcaagttattttcagaaaacttatgccaatttacatttccaccagccgaaaggatatttcccaatacccttgttgttaacacatcattttcaatttgataggcaaaaaacaaacaaaaatactttaaaccttgtatttgtattggtgcttaaaagtgagcttgaacatcttgttctctgtcttttgtttatttgtttttgttgccatgggtagtattctgggatctgctggttcatgcactttgccctgttattgtgttctcatgtcataatgtagcaattaagaaaatgagctttggggtcccacatgccttgaaaaggtccagtagctatcatttgcctgctgtgtgacctgggacagattctcaccctttgtaatcctcggtttgttcagctgttaaataagaatgatgacagtgaccacctcaatgcagtcgtatcatgtatggtaccaggtttggggctgatgttcaacatgctaggttttagtactttagtgctcatttaatccctctatttcttttagcatgttcttactccttataccatgatggattatccccacttagcttaattgtatgcaataaccttattcatttttggggtatttgctatggattagcagttgggaaaacaacagtgaacaaaactaatatatctccatcatgaagcttatatccatgtgtatatgtgtgtgtgtgtgtgtgtgtgtgtgtgtgtgtgtgtgtagggaacagaatataacaagaggacagacaaaataactgtaaattacaccatgtgctatgcagaaaaccaacagaggccaaggcagagactaaaaagggggacttatgatagataaggagaggaggaggggtcttttggaggtggaaagttcaatgatgagtcctaaaaaataggaaggagatagctgtgttaaaatgttttagtgcagagcaggcaggtgggcaatatgtgcaaaggccctgtgacaggaaagaacttcaggtgtcaaaggaattttttacaagtctagcctgggaagaagagggtggttgggaatttggcagttggggctgagtaggggggcaagtggaggtgagattacaaaacagggaaggggtcaggacattttgacttttattttaaataagggaaggcctctatagagctgtgagcaaaggcggggatctctatcctcttttttgagatggagtctcactctgtcgcccagggtggagtgcagtggcgaaatgtcagctcactgcaacctccgcctcctgggttcaagcgattctcttgtctcagcctcctgagtagctgggattgtaggtgtgcttcatcacacccagctaatttgttgtacttttgttagagacggggtttcgccatgttggccgggcttgttttgaactcctgacctcaggtgatccacctgtctcggcctcccaaagtgctggaattacaggtgtgagccaccatgcccagccagagggactctatcttattcctgttacaacaagctctctctggggctggatagcaatggaagagctcaggtaagagttccacctggttcttcaagtgagaggcattggtggcttggactaggatattagcagaagatatagaagtcacagaatggtattttagcaagaaggttccaaataagtcatttgtttctccactccatgttgttcactaggaccatttttaatactggctgtcattagaaattgcccagtgctctgaaagagtgagtttccaagtggcagataatctggcttctctcttcagtgtaatagggtactagtgacatgtcctcaaacttactcttctaggaaaagctctagtctcccaaaaagccatgtttaaaatggaagattgcagaacttcctgcagtcataagagccattggctttgatcagtccctagtctcccaactgaaggaaacattttgaaaaagtcaactcagttccagcacatggtatctttctcctctcttgattcccatgaaaaatgctgaccctagaaaaacaacaaacaagcaaataaacaaaactatgagggtaaggaaacaagatagaggccagctctcaagactgtttattctcttttaaaatacattgttcctcttggtttgcatttccctgatttgtttgctcccttgcagagcaccctttgccatcatccctatacatttccatgtaagttctgcctatgggtttatagcttctctactgacaggaagctctttgaagacaagaatgatctatgatcccatatgatcctaccttcttcagcccttatctgtcacaatgcctttttctcccacttattgtatgaccagtactgcttaacttttcttgcttttctcttacgtgtaagacttggggctgggcatggtggcttacatgtgcaatcccaatactttgggcggccgaggctatcttgagcccaggagtttaagaccagcctaggcaatatggcaagacctcatcaccacaaaacatacaaaaattagccaggtgtggtggcacatgcctatagtcccagcttcttgggaggttgagatgggaggattgctttgggctgcagtgagccgagatcatgccactgcattccagcctaggtgacagactgtctcaataggaaaaaaaaaagacttggcagagaagaagaaaagaatgtggaggcacttggggaggccgaggtgagtggatcacctgaggtcaggatttcaggactagtctggccaacatggcaaaaccccatctctactaaacatacaaaaattagctgagcatggtggtgtgggcatgtagtcccagctacttgggaggccgaagcgggagaattgcctgaacctgggaggcagaggttgcagtgagccaggatcccaccactgcactccagcctgggtgacagagggagagtgagactctgtctcaaaaaaaaaaaaaaaacaaaaaaaaaaaccacacacacacacacacaaacaaaaaataacatggagagtgcctgcaaggttatttctaggaacaaacagttggggaagacattgggattcttttcacctcaaattttcatcttaccagtgcactatgcttagaaaaggaataggatgattttgcatttacatgatcctccttatcaactggagctggggccatagagtccaagattgcatgtgtcctattcagggaaaccaagctctttgtggggagggtgcagtagcgacccagttctggaatgacaggcccttctcctcatatatgtgtgtgtgtgtgtgtgtgtgtgtgtgtgtgtgtgtgtgtgtggaattatatatatgtgtgtgtgtatatatataactatttacatttagttttatatatgtataaagaaatacatatattttcttcatattcctttgccttccccattctataaaaagtatttcaagagcttacaacttccgcaagggcagagaccatatggattttttcctccccattgtgcctccagcctgcagcaggatgtttagtatctagcatttccagttaatacttgatggatggaaggctaggtgggagggtggatggatgggaaacataaaacagaaaaggtaacacaagtcagttgtcagcagcaaggagaaaaggacaccaaagacaggggagccacagaacacgtagtctccgatggggtatttgagccctctgcttgagccagtttgcacttgcaaagagggaaccaggacagccgtacaaatcactgtctgagagattaagacacaatgattgcttaggataaaatacaacttttactgactgaaggtaagaaataaactttctctggggcttctcaaaaagaagataatggttgccccaaattctcaggaacattgacttgccttcccaccctattcacctgaggctactgctcactgaagtcctaccggcagcttcctacagtagggtcttcagccaggggcgcatgcttccatagtgggagttgaggatcttgggttattagagtccctggaagggcaagaggttggtatacagaaagtgagctcgtacagatcaccaaaaacccacaagtcattctgatctgtccttcccccttccacaaagagctatgtccctacctgtctgccttttggagaatcacaggtaaaacagagtgaacactgtcctcagcaatatccttccagttgactgatgagtccttgacttttcttactgacagaagtcccagaaggcagtaggtgaggtgacaggggaaactgctattttggactaattcctagtgacagggaggatgggttgggaaaatagaaatgacaagaacttgggaaaaggcaactgtgctatcttagaattcacaacagctgttggttttaatgagtctgagaatgatttgggcagaatccaaaactcctgactcctcgacctgtaacctgctgctgtgctgcttctgcagggtggtacgagaggggacactgtccagaggcatgcggcttcttactgtggggctttggccccaaatcccaatgagaaaatcacaaggactccagctgtgcccaaggccaagtgggtcttggttgtgtaccctgatgtgggcctttggggtctcactgatccagaggcagggggaggcaaagggagacaaactcatggtgggggtggatggcgggaagggagagcattaaaggaagaggagcctttctctaaggcctagagggacacacccaggtcatgtcatcaggcgttatactctcagacctttccctgtttctctgttctatttttctctctttagggtctaggcaaagggcacctttggagatctcctcttagaagacctctcttcctttgcagaattaatcctccctgcccctcaagtcccaaacattttactttatttgatccatttcacaacatcattctggttctatgatgttgaccaatttacaagtaaggaaagtgagacttacaaagatcaagtaacttgctgggcaaggtggctcaacgccaccctgggaggctgaggtgggtggatagcttgagctcaagagttcaagaccagcctggccaacatggtgaaaccccatctaaagaaaaaaaaataataagaaaaataaaaaaaaaaaagactgttatttcaccaggctctgcagtggtcctctttgttgtaaattagggatccatgtatgtgttggtctgctttggagttttccttggtggtccactggacaatttctgtatttgtacactaaagccacactgccttaattaccatactttacaataaaccttgatagccagtgagataattgtcctgccttgttcctatttttttaggagagtttttggatattctcattcctttgtattttcatataaatttattttattttttaatttatttattttttttttgagacaaggtctctgtcaccaggctggagtgcagtggtggatctcggctcactgcaaccctgactactgcccccgacaattcagtcttccaagtagctaggactacaggcgagtaccaccacacttggctaatttttatatttttcgtagagatgaggtcttgccatgttgcccaggctggtttcgaacttgtgggctcaagcagtctgtctgcctcgacttcaaatagtgctggggctgggtgcggtggctcatgcctataatcccagcactttgggaagtcgaggcgagttgatcacatgagcccaggagttcaagaccagcctggccaacatggcgaaaccccatttctactaaaaatacaaaaattagccaatgtggtggtgcatgcctgtagtcccagctacttgggaggctgagtcatgagaatcgcttgaacctgggaggcggaggttgcagtgagctgtgatcgagccactgcactccatcctgggtggcagagtgagactgtgtctcaaaaaataataaataaataaataaataaaatcaagtaacttaccccaaggcctcacagctcatttgagggaagactcagattctcaatatgggggtatccaattcttagccctgtttggtaaccactgctttgtgccaacttgtccacccactcagctctggcttccatgaaatgatgccgtctgtccactgttacaaagtgtagggaaaaggagagatttccactgaaagctgcttggaatagcaaccatcacattgctattttaagatgcagtcttttccctactagggaatccctgaagcaggcagttatttaaaatacaattggcttcaatctttgcatggcttccatctagaatcaagaggcaggcacctaagaagaaatattataatactgatcttccatccatgggaggccttgcctaagacaccttttttctggtccctgactatgaggctgtaataacacagatcagagcttttttatacctccatttcctcatatgttatcactgagcttcaggagaaaaagaaatcatgggaactgagcatagagaaagtaaaatctcaactgattgataacagatcagtctggaaaaatagaaaagtattgaaaatagagtcgcaatgaaggaatgagctctatgctgataaattcaagtatgtcccatgctgacttcccttaatttcccaaatttgtgaaaaggatagaaaaggtgggtaactaatattcgttgagaatctactccatgccaggtactgaattgggcacgggtgcctccttctgctctcacatctgtgtttcagcttggaagtagaaataaacataagtaaactaataaaccattaatataacttaagaatatactgagtatcatgaagaaaacaaaatgggtgatgaggatgacggtaactgggatgaaagagggttagccatgcaaacaggaggtgaggggcactccaggtagtgggagaggtggactgaaagtctagaaagccagaaggagttggtccagaaggagaaggtcaggaccttccagggcatcttagctgtggtgttaggagtttagaatgtattccaagtacaatgggaaggcactggagggctttaagctagagagtgacacagccccatgatgttttatgaacataaccattgccatcccaatttgtggaacaattaatttattcccctttgacataagtcaattttctgatctgtttttggttaatttgatggccttacacatgttagtttgactttttgttcatggtattgaatctgtaatccttcttgagagatggggcatacctatgaacaaatggctgtcaccacttgatctctcagtgttttggagggcaagggaagcaggacggggcttctgagccataaaaatcctaggccatgcagtgtccagcagcctgaagcttggagacaggtttgtttcaggatccctagtatcagcagacaggggttttatggtattggccaatcaacaagtgtttgagtgctggccctttgccaagcactgtgctggattctacagactcagttctgtctgtctgtcccttccatccctgctcctttacatgtggtcatgcaaaggcttaatgatgtgatgtgcatcataaaaacccaaggtccacagtgatgcctattctgtctcagggctcctgatttctccacaatgtccctctatgtagaggactcacttctgatatgactattctggatctgaatgtgaatagctgatatctgctctgcacaaaactgtcgcagaatgggcatgtaaatgaccaaatgaactttctcagtttggtgagcacatccactaagagggcccatcttgatcatccaaagaaaccattttgattttgaggaatttatagtgcaaaatacaagagatttataagacaagggttcttaacctgggagccagatgttcttagacagtcctgggttttggtggaggaaatgccccaaccctcatgaattttatctgaaattgtgagtgtatagactttggattttgcggggaggaagtcagaggtaggagaaggtttatagccactgccaagttctcagtggatcctttgactctccaagggttataaaagttgtaattgttattatagctctagtgttcctgattatgttagaaactgtcaaccccattatccttggatggcttgtcaaaacccacccctgtgaaaaatcccattcttcacccacaggagtcagcttcctcttcaaccaaacttctgggcaggctgagggaagtatctatggatggaagacttggctttccttggctccctttgtttagtttcactgcagcaagttatctgaaatgtgagtgggatgcaactctaactgaatgggatttggtgcttctggcctgtccttgcatccattgtctcatttgctgttgatcaccaatgtgaggtgggtgggtggaggatccccatgttgggggaggtgcatgcacagctcagtaggtttaaatacctctctcaagatcaccaagccagtaagtgtagcattgaacccacctggaacaaataatacttggtcgttttaagaatacctggaatttgttttagtcaggtataataaggcacacagacacagaaatgattgtcatgaaggaagaagtatattgtatccatagttccctagaagcagaaggcatgccataccatgaagggacacacagggaagtgccaaggcaagatgagtgggcagagagagagatctagagggcaggagcctttattgtgttttccatgggaagaaagagggaaagcaggccaaccaggcttagcgttggacagtcaatcatctcagtgggcactggggtagaggggctgccccgagttgtctgatacctggtcctggggtgattagggcaggtggtatgacctcgagtgtgagagcctgatgaagggaggtgattggaggcatgggctgtggattggttggtttgtgtatcagaaatgcacttgcaggccagttgcttactatctccaggaattagctaaccctaggagggggagtccctccaaggtcataaggcctcagacatcagagcaataatactacagaaaaatccaaagacatggttaatacactggccctgtcctctgaatgaattcagtggagctggatagtctaataaattgcatcacacacctttaaggatgtttgcagcttgacttcttactgctccattgagctgtatgtaatctcgtgttccattgtaccaaccccaggtcgtagtctctggatggccaagaaacacctgtctccttcaccttaacaaaacacatggccatagaactggacttttatccctttggccagaagattacaaagaataatttttttttctgaattggaatttttttttcaataccgcacttgaggtatcaggcacttgtgcttgggaaaaagagattgtatagactcttagagcgtccctaaggtgacagtccatttttcataatcatctatgatattcgtttgttgaaattttattacttttgtaatttaattcaatttatcccattttattgctgttcagggtagcgttaccatggttgcctttctcttccttctggataaggatgtttcttcttttattatgagcgtgatggcttatagattaaagcagcctgctcaatataactgtctcctttggagtcaaccttctttgagcccatctctactcttgtagaattttcatgaagataaatattggcagtgatttatgaagcatttatgtgagtaatcaggttccaacccttatcttctgcttaaagattaaggattttattcagaaatgcttctctgtaccagaaatcatagaaatgagcaaataacaatgaaagttggttagtaatatcttttgtgaagatatagattaagaacatattcattagctgcaaatggactttaaaacataaagatgtcaggagacccctttctaaagctgaagtcattcatcattttgagaaatcctggaaatattttagggaataactgagttgggcagtgagtccaaaaggacatgagcaggtgagaagacaggaagatgtcaggaaggcatgcctaatacggaggctgccacttagctaaattaaaatttagaacccatgaatgtgggcaccgataggtcatgaagagatttggtagcaaatgacactgacataaataattcatataacttgcttgcttttaaaggtagaaggaatggatttgtagttaaatgttttttaaaataaaagattaccttcttttttctataaaaatatagactgttttttgaggctcataagtgcttggtctccaaaccttcctttcctctgcatctgggagcaagagtggaattattataattccaaagattgtgaagacccagctcagcagctacagacagctgggtacagatctgccctttcttggggaaagaggaaagtatagttagctaatcctgcttgccaagtctggctgatgtctcatgatcctgccttcttcggttgacacaagctttttaaaaaatgtcattttgatccagcttctctatttttttaaccacccactggattgtaaactccttaaagttttgcctcaatctttagtaaattgtaggaatagctttcctggaaatggctccagtgatttcttaatgtttggtctcacttagacctcatctgcttggtggcattttttaaagtgttggccacagcctacctgggtcagaccccacggacattttttaaaatgtatatccctgggcctactttattctgaacctcgggagggtgggtgctatgactccaccttcaacatgtgattcaaggctcctggtgatactgatgccttgtgaagtttgaggactctcactgccctggccagagccacagtcatctctcacctggaacattgtagtggcctcctacttactacctctgtttctacccttactctctatggctgtggatgggacatgggcattcagaattataagattatcataggataatggaatggacagccaggttgagtgcactgttcatggcctatgctctatcctgcagccagaatgatccttttacattatgtatcagctcatgtcagacttctactcaatctctcctgaaaaaaaaggaaaagtggcttgcagggatccacatgatgtggcacccattgtatctccaagttaatttcctgcaacctctgctaggtgactgcattccattaacacgagccccttcaatatccctggagcttccctgtcgcagggaccttgtacctttggttcccttcacctggaatgctctttcccattagctatatggcttgttccttctcccccactccattttgtctagatctttgatcatatgccatcttatcaggaagaccttcccatcttccttttctaaaaatgcagcccccatcactctccatcaccttactttgcattattttctttatcagcatttaattcaacaaatacataaacattctctatgaatttgccatttattatgtttccctcccaagaaaatgtgaagtccctgagggcagaatttgttttgtttacccatggtagccctggcaccaagaatggtccctggcacatagtagtcactcatgagttacacgtgatagatgacaaactactcctcttggattctctcagaaacacaagctttcttcattattgaagggagatgtgcaggcagcagcagcctattttctgtctgtgcaattgccccatataactctcctggtagccacttccttcccctaattttaatggctgcagaaaggagaaaatttgattcattatctttacagactatctatcttcaccaaaggttaaaaagaagggtacccctctcagtttctgatagggattgcttctatgtgagtaaaaagcataatcggttttttgaaaaaatctggatgagttttttgtttgttccattggggaagttttatactaagtagattaaggtaagtgactttgaactttcaaagtctacatcttaacattttattaagcttaattgggtttgtagaacatttaaagaccatccaaacttaagtgggagatcaaaatgagcgaagaggctgatgcagacttttttttttttcacccctgcctttgagctgcattaatgaaagtggtgcgctccatgcctgcagatgatgagcatgaaagcctggctttccggggagctctggtgtattccagaactatgtcacagcaccttcccatggttgtctgtgccgtgcacctggccttcaggaccaccccagatttggctctgcttcacactccttgcatctgaaaagtagctgggctcaaggcagaccactgaaagtttgttacgtggtgcttcctagggaagaaactccagttgttggaaataaaatccattagggtacagaatctgttaatgatggaaattaggagcaatttgactgttgttcacagaggttttgctctcagttaaatgagcagtagcgtaaggcagtactaactggaatatgcaaggccaggacttaatttccacatgtcatctcttttttgtgtttgattttcactgaaacatttattcttcctatgttgtaacagaattgttcaggaagtagcaatgtcattactttcttttcacttaaaatgatctttaattattaaagcaatgctagtttgtaaaatggtataaaatttatgaagtaaaaagtatgaggccacttttagaaaaaaatagaattttgtgctacacaaaacccacaacttgctttttacctttaccagtacatcatggatgaggacatagctgctgggtagcccactacacgaatgtaccatgaacttgtagccagtcagctatcaataaagacttagaatttaacagtttttgacctttacaagtaatgaaggtgaacatccttgtacttttaattgtgtatttttgaaaatgtctaaatctgaattctagggcttccagaaaatatgtactctcttctaccacttctgtcctttttgttacctcttagtccccataagcattttatttgttattccagctataagataaatgcctgagggtggaattactgtgtgaaaaaaaaacctgcaaatataaaatgctattattaaatttctctccaaaatatttcctactttaaagtaaaatctcttttcttctgtggtcagttgaaaggcattactgtgagagatgtaggacgtgaacccagcatcctttgattatgtttattttgtaggcagacatgcaacaagtcattttcatgccatttctgctcagataaggaggtcagtgtactgggagccaaggactacaaatcagtggaaatattgaacattattctgattttctttcataagcaataaaataacatacaaaccaatgaaacaaatataatacccataaacccctcagtacattacctgacccaggggatggtgctgattgtagcagccacagtggtggtggtggtcgtggtaggactgtgctggtgaggtaggggacatggtgatggttttcattattatggttattgttagcataattattctgaagcagccatgtctgatctgaagtttggcacaattctactggttttccaaataggttgccatcttttaaattaggagttgtagaagttttgctggtgattcacagtattgttctggagttttaactatgtctccaagagaactcagtttatatgaaggctcttcgtctagacagcagaggaggctggcactcacagccacttttgctcaaaaatatgggttgttttgtgttgggtctttgcttatgaagatagactcatagcttcatttcctcagaggcatctcttaggcttcttgcttgccaaggagccagtggggatacaagtttttgtcggtctagtgtttcccctttaaagagcttaaatttgaaattaaagacaaagatttatgagaaagcatgggtctggtctcaagagacttgattccagttcatcctggattctgtgggtgctggctctgggccttggagctggttgggatcttctgtattgaccaaaccagcatctcccaaaggttgaaagcagataccagtgctatcctgaggtcttagaagtcttctctcatgagctgcaactttgatgaaatgaagcaaaacacttaactgggcctcagtttctcccctcaatcagagattctcagttaagtgccgacagtggacaggcagagaaagtgaacgggggtgcagctatatgaaggagggtcagtggtaatcacttttggcaatatgaggctggatctttgctttttttttttttgacataggccctcactctatcaccaggctggagtgcagtggcgcaaactcggctcactgcaacctccgcctcccaggttcaagcaattctcctgcctcagcctcccgagtagctgggactacagatgcatgccaccatgcacagctaatttttttgtatttttagtagagatggggtttcaccatgttggccaggatggtctcgatctcctgacctcgtgatctgcccacctcggcctcccaaagtactgggagtacaggtgtgagccactgcgctcagctggatctttgctttcttttccccccaagagaagccagaatctcccaatttaaaaaacaaaacaaaacaaaaaccgtatcctcactcccaaatgtgactctgatgggaatggtgtggagaagagccagaggactggagagaggtctgtctgcctgcccatccaccccagaaatccccttgcaggagctgtgataaataaagtaatggccttaccaagcacagatgagcacagactgacattccataataataacgtgcatttacatatccctttaaattaggaagaaaccattacctcacaactagccttcaagttataatgcccagattagaggatatgcataattaaaacagaatattcatttttataatccactgtaagcgttttttgtgttttttttaatctcttcatgtattgagtatcaatgttccaagtgcattgctccatcagggcccagccaggtaaaggagacacatcccttccttccctagtcaactggatactctagtggagcagatcgacttcacagaccagctacacaaaatgctagctaaccacaattgtagcaaaggctggggaggagcaataggagcacttgacccatcagactagaggagctggaaggacatcacctggtaaagcctttgataccacctgctgagtgtcattcatctaatgccatgtcttcactgacctcagtcacaaagaggtggccacaggctgcacatggcccatccgaagggttttgtttggactgtgtggcattgacccacataccattttaaattgaattaaaggattttaaccttttcattccttatctttcttccatttaaccttaagtaccatctggcaggtaggtcatgctttgtttcaaagagttctgacctcataagagagggttgagaaaccagtagaaaataagaaagccaggtttttacatttgttttttgctcttcaggaaccaaaagcttaggaagactagaaagagtctccatagatctcctggccacaggctgtgtctctcatcccagttaattatcttctaatatcatgccagacaccacagatggtaagagagtgtctgcagcctgtcctcaccattggagggaaatgtcgagggtctttcaggggcatttttattcccaagaagagcacactctgcatttcctgtgtgaatggggaaaatgcttggggatttggtccagacttagatgatccttgtccatatgtgtggagcaagcccaggcctgtgaggctgccagtctcccattcccagttattctcttctgttttgacttgcgcaccaaaaaacaaccaccaccagtgccatatggtttaaaagatcaaaggccccaattttgagtacatttctagctgactatacttcagatgtcttaaatatgttcctgcagatgggaagcatggagcattaaagaggtaagccacatgtgtgtgagccatgcatgtgatctgtgcaggatggcgaaaagtgaatgccgctcagccatgcgtttgtcttcccttcaggttcgcatcttcacatacctcattggacgagaggctgcgtttgcagacaatctaaagtggatggcctgtgccaacaaaggtgggtcttcgcattgtgctcggctctgaataacttccacctacttgtgcagaattaggaatattcatgagaaagtagagagttctaataattctaagataaagtctgggtatatctaagtgattactgatagacttgtaacggtttcttccaaattatgttttttttttttctgttctttttttttttattttttttttgtggacagaatcttgctctgttgcccaggctggagtgcagtaacgcgatctcagctcactgcagaccacgcctcccgagttcaagcagttcttgtgcctcagcctcccgagtagctgagattacaggtgtgcaccacaatacccagctaatttttgtatttttagtagagacggggtttcgccatgttggccaggctggtctagaactcctgagctcaagtgatctgcccaccttggcctcccaaagtggcctcattacaggcatgagccactatgcccagtgccaaattttgaggacatagtcaagtggagtggttaagcctttccactcttctgcttagtagctgagtagccttgggagaattgctatggcagagacatttactgtgcatcaaatatccgtatgctctctcatcattcctagccttcttgcctataggtggggcttcaagactggttctggccaatagggcgggagtgaaatcaacctgagtcatttctgggctaaagcatttgagagctagtgtggtggtgttggtactctcttctgctcttgtgaactctgaaggtacatggtccagacagaacagtcacgagatgcagcagccttcatcagcctgggtccctgagtgagcacatggagcagatgactttcactgccccttgcatctgccaacccacactggattataaatagtgttcatgacaaataaacttttatgttaagccactgagatttttagtttgatatgttcttatagcataactttacgtacattactaattaagttggtcaactttaacttgcctcaatgttctaatactcaaaatggtaatggtaataataattcttcctttaattttttaactatcaaataaaattatgtatatttatggtgtagaacatgatgttttgaagtatgtgtacattgtgtaaatgactacatcaaggtaattaacatatgtattgccttacatctttattatttatttgtgatgagaatacctaaaatctattcttttagcaattttcaagtatataacacattgttattaactatagtcaccatgttatactatatatctcttgaactcatttcttctgtctaactgaaagtttgtatccagttcttcctttaattcttattaacgaaatggtgcatattaagtgcctcgttcaatactaggacataataagtgctcaataatccttagcttttttatattcataaggttaattgattaccaattccctgttgcatgtcagaaacaaatagtttggggacagcactgggaaggaagtaatagggctgcccagtctgtgaaggccttcttttcattttacacatggccaagaaggcaaagcatagcaagttaatagggaggagagtccagactccttgtatccaagtcgtatccaagtcgagcagtcactatccaccaactatgtgcaagttaccaaacctatctgggtagatctgagtcacgtcatctacagagcagaggtagtgacaataccttcccctcacacatgttgtgggcatgacatgatgccatataaataaagttggtagcttggctctggtatgtaagtgccctgagttattctcttgtgttatgttgatctctgggtcctgttggcctcccttctgaggctacaagctccatgagagcagcctttgactcttatttcatcttgggtgctctgacacagcccagcctcgtaccagagtgggtgctcctttgatgtttgaaaaaataggtaagttgactctaagtactaataaaggaaggtaggtcctgttgcatagtagattggttcagtggtctgctttaaatgggtctcctaagccatccttcataaaagttccagtgtttggacttcagtggagaaaagaggactcagtgaagggtttgtgggtcttagctccagttttgatggcctaagacaaagttgttttaggtgcaagccaccaaagttgttccctgaaattaaaaaagggggcattttggagagaggggggtgactgagaactctggtaggaagggaagcttgggtctcacaagggagaaggaagacgtgtttgtgtttttctgttccttctcagtttcttctgacatgtccatggcattcttcttccttgtagatagaccttccgtactatggcatgcatacagccaggaatggccaccccataccatgcatgcccatccatccacgcaacaatactgtgggcaaggcacaatatcggaaaggagtatttatatcttttccgtttgaggctgactagcaaatctaaattctgatttcacgtccttctcctcacccctttgaagagattatggtacccagcttgggccagttcttcctccctgctgaattgggggtgggcagaggaagcccatggggaaataaatgcttctgtgggggggctcagcattgtggatgggagtgtgggaaagttctccaagaataggtgaacagccaggctcttaaacctgcacccatctttccctttgcttggcattttctttaattatctgcttctatttgaacagtcttttaagcaaggctcaatttcctcatctacaaaaggaagggctgcatggaagtttttaacatatccttgaagctctaaaataacaccttctgcaattgtgtttcgttcattgtctggcttgcttcactaaaaggtatcaataattctgcttgtctcagagttacacatttggcctcatttcagggagaactataggaagaacacaggcagaggagagggaggccgagtagatcccagatttcctctgagtgaagaggcctttcttgaaattagttttggaactttgttgacatttaaaaaccttgagttagctatacttttcccattttttcctttattctgtggtcttgaaaaaaagagttcctttccattttttaattttttttaaaaaaatttgctgttatttcttgccacatcagattgcaattcttccatcagctagtatgcatttagtcatgggttattgtttttaccactgtctgtgtccagctgatgaaaattactgaaattgaagtcttgtcttaatcaactaatattacaccataatttagttttagtcattgtttataagaatctttgaggcatccttttgaagacagtttagtcaactcagagtattttagggcctggctatagaatatagcctttaggatttataagttctgagtacagcagtgcagaaaatccagggaggtaatagtagctgcttggctggacaggctgtggattccataataattctccttcccttcctgtctacatccagttatttcccttcctaccagagtcagcccttcttgatcgtttcatcttcctcattctgcttctatgtaaagagccttgggaatgtcactgtttgccactcttcaaagtagcaatgccatcaaaatgtgatattccagtcatctgtgcccatataaacattggcttcacgttgcgtcagttaaggggttttggaccatgtaacatcggtgagcaagtattcttctatggtcattaattaaatcattgtttatagtctcagattgttatagtatggaggcagcataacatttttcatctcaagtgtcatgaggtccagagggcccccttacatattttcaccctgactcagccaagttctgcagtgaaatgaagcattagcattcagggaccagagcagacccaaggagcgtcgaaggaggcagaactaacgcactgggcctgaccacagaatgaccctgggagggagcaagaatcatgagggctctcacgttgtccctgagttagtggtcaaggacctgctatcagtgcaggacttcttccttgggagtctggtagccatggagacagttcttagctagcagatctcagacactttcctctggaaatgaatgtctggggacattcgtaccccttgcaatagttctctgcctcctccagtctaccagcaaaatccagggaggcctggagcttgtgagtttatttcattttatgcataagtaggtcctgtcttgagggaaccaaccctaatgagacaaagcagcaagccattttacatacattaaaacaatcattaccactgtagaatggctggtggaatttaaagttatgcgttcacactatttcaaaaataagcgaactggaaaacagaaaagagggccgactaccgactagcccagacatttcacaaagccatggtgaccttctctaacattcagtatgccaagattttaaataagcactggctgattctccttcagaaatcacagttaatggagtgttttccagctgtgcaaataaagaagggcctccatgtttgggttctcaaccgatcagtcatcgtcaggtccaatggaaatgccacatgtgttgtcgtctgcttagcttaccccttttccatgggctaaaggtcattctctccttatctgaaagagaactggtggcctgagacttcctggaaggtccagctcctaatcttttttcaataaaaagattcttaacctcattatatctttccacatgtagtgtcccccaaaagatagcttcacatttatgaggccggaatggtcataggcgacagcaggagaaaagtggcaattaaaacattttgctattttaagagaggtgaaggaaggcacaaacagcagctatttaaatacctttttgtagttcattgcacacattccttagaatcagagattttgagtgggaatgaagatggtgatgcttgctgttaccgtaaaacagcaactaaggatgacaagctgctcactaagtgccaggcatagaacagagtacatctgtgcattacctcttttgatcctcccaaaggctctatgaggtactgttatcattatttttgtttacagagaaggaaactgaggctgagcaagactagcaccttgttccagattaccagccagcaggcggtagagctaggatttaggcccaggtgatccaaagccccagcctgaactcttcatcagatgtaaggctgcttctctttggagaggagaaagctgtgattcatagagaactcttacatatctctcttcatttgaggtaatctaggaaaagaaaactagagagtgagaaaggatttcaatgtgccataattaacaaaggccagagctgggatttatgcccagcctgtatgttctggaaatggcactgcttcagcttgcacagtggtatggttcaggtcctgatgtttcagagttggggacattaaggctgtagataagacgagaccaggagaaaccacagcaaggtgtgatgggtgtagccacagagctataagaaggagacagcattcctatttccccagtgtgtacctttagattgttttcttctttttcttgtatttttaacatggagttagaaattaaaatgtagtcatagtcacaaaggaaaagatgtgtcccttgatctgaggctcaagctgattttgagagctctgctcaggagtgcggttctcccaccaagaccattgggctccctgccctcaatgtccattctctccaacaccatgaatatgggttcttctgctctcagcactcaacagacctcttgcttgttttttgtgaagtcagagaagacagggaggtaggaagctgtttataaattgtacctttttctatagaaataagtgtttttttcagtagtgtgtgatcttgacagggaggaggaggaagatgacacagaacacagtattgggagcgtcttccaagaacaccattgctcatagggaatgcaaaccagggaagccacagcatcaccttcactgccctgctaaatctcattcttacctcggcaccctctggagactgatattttggtgctggctctcaggttttctgcctgccttgcttaaggtgggaagagtctttggaaagactcaacaactcaaaggaatcaaaggaagctacacccgtcactccaaagatggaaggaggacctcactatttgaggtagacagctaggatctgcccactgaggacagactcctggtacccttggatctggtcattgcaaagtggagtatttaatgattcaccacaggagcttctcatgctcaggcagctttgaggcaaaagactctaaaaatccccaagtaagggtaatatctcagaaacacaaagcactgcgttgcatatggtttatcacatgcagtatttgtaacccagagttcacagaaggagctctgcaagggaataaggtaaataaattgatgttatagagaaaaacgagcagaccatttgtaataggtggctaacttcagcattaattgctccttggtaattaccgaatcattgctgattctgttttcttacatgatatatgaggtccaaaaaagcacattaaaaaagagaataaacattcaagacctagaatttaacaggaaaaaaacagagagaaaggggagggaaagtggccagctgagagaatacagagggaaaacaagggaagtgtctatggttacagccagattctagcccttagtgatttcctattatccatcatttgttaactaaaacttatactaagacatttaaaaaccaaaaaaaaaaaaaaggctcagaaagattttaaactttaatgagttggaatcaaatgtgcataagctttgcagcatacattgttattgtcaatattatttttaaaattttatcttttcttacctttttatacatctgcatccctggtctacatagtgaaatataagttggaactatagactggggtttgagtagatctttgttgttgctcattgctcaaaggacagtcatatattgccccatccccatcctcagagttccccagctacaatacgcaaatagcccattagagttaccctcctgggggaggagctctgagctgctctcctgtcccttcccagcagcgaaagaggcagtgtcttcagtggttcagagcaaaggctttggaatcaaatgaacctggattcgaattcatccaggacaaattactgactcagagtttgtgtttcttcccctacacggtgagcacatgctttgggccattgtgaggcccacatgcagaaaggcaaggtggatctcagtaagacctcagtgaatgttcccaccttactaatggctcctgcataccttccctccctgttcttggaatattgctcccaacaaggtggggatttttgaatcatttcgtggagctaatattccagttagagagaacacaataagcaagtgagaatccaatgatggatgagtcctctgaagggactgatgcagggtgaagggagaggaagtgacttcagacaggaatgtcagggagggcctctctgatctgagctgagccctgagtgacaaaaaggaaccaaacatggaaaatgggataaagggtgtcccaggcagagggcagcaagtgcacaggccctgaggaggggaacgcagttggcatgtgagaggcggggaaagaaggccagcaagcctgaacagtgagcaagagggagatggcagggatgaggtcacccaggtaggtggagccaattcagggagggtcttggaggtcagggtaagacatctggattttattttaactctaaatataagctattgtaggatttcaaccaggaagatgatgatttgctgtgacctcttagacaatctctgatggctgtgaggagcctagacaagggggagagggatttgtggggagactcttgtggactctgggtgagagatgatggcatcttggagtagtgaagcagtggagattgggaagtgaatttagatagattttagagataggaccagaagaacatgctggtgtattacatatggggtggggtgaggaaaggagggatatggaggataattatgttttggcctctctgggaagtggtgccattttctgagatgagaatgaccaactgggagaggaatggatttgggaagtgaagtcgggagttggctttggatgcattcggcctgagaatcctgctagttatccctgtggaggtgtcgggtatacagttggccgtgggtctgtcgctctggagagaagtcagctttctgtaatctttcagaaccttggctatgataagcaaggacaagtggggatgatttctcagctctgtccttttccaaatgtatgattgttttcccccaactccctctctatcctaataacctgtccctcccaccctcctccttaaattcatctttcttcccttggcactgtttttggaaaatccaaatcagagagctttactgctggctttgaggattagatgtgaatacaggcaaccaagaagaactcctacaagatcctgtctgggcccaagagcacaggcacctaaacagaattgtttgacactgcaaagcactcatccctgtatccttaaggtctggagctattgagttgtgtctccctactttaccatggtagcacccctcttagcttgtcctctgtgtcaagaccccttaacgcagagcccaagatttgcctactaaagaagagatgaaatattttctttcttatcaaacgctgattgcagcctccatgcttggagagatgataactgtgtatgtggcatgttccctatcctctggcaatcctttttaaaacctgtcctttccgaccatgcctctaagaggaaccatctaggagcattgctagagcagcattccaaatgggtctccctaactatggtgcctgatggctgagagaggtgaacataggccctgctcccaggtctcaaactaggacagaaactcacagcctattcctttggggccctgtttcccctgggatgggaaaggctctgacccaggccaggagggtggggcaggcaggagtgacaatgcatgctaattagcactatgcagagctgtcatcaggaacccagaagccacatggtcccaacctggtttggggttggcacaccaaattcaaaccagctggcctttgtttggaaatcctctgggtgggtcccgaccctttctggacaacagcagggctggtatttccttaccctgagccctattttagtcactaagagattctataaactctggagctagtgctgtgatggagctggcctcagaggcacacatactctctttaatttgtttggcgagtaggaggtggtatgagcctaggatccttatttagaggcacggggaggaaacaagaatctgtgtccatcccctgcttgaaatccttccctgactacctgcgtataggataaagtctaaactctttcccaagttctgtgtgacagtcctcctgcccatttctgtcatcttatgtcatcttaactctaccctctctctaccaactccttaactccagccattctgagctatttttagttcctagaaggggcctgcttctctctgatcctgggtccttatttatattccttgttttgctggacaccatctttaatcccagttcctctggctaactggtcctcatccttcaggttctagctacactgacccttgctcaaggtaaccacatttgattggctgtgcctgttgtaagttttagcttaatgttgaatgtgccattttgtaattgtctgtttactcagaactgccaggccccagggggggcaggggtcttgctcaccttgttaatcgctgcttcttcaatgctaaacacaaaggaaaccttcaataaatgtgtgaatgaagggctccctccaagggatccaggcctgtgttcagttcaccctttcccttttaacatctcctaacccacagcaaagctgatgtgaccccaagctctacagcagtacaggaacatagcagcgccctggaactaaagaccaaaatagtgtcaccaatcacaagacaacagcatggtgagaatgtttctgttgcttagaaatcatgtctacctggctgggcgtggtggctcatgcctgtaatcccagcactttgggaggccgaggcaggcggatcacgaggtcaggagatcaagactgtcctagctaacacggtgaaactctgtctctactaaaaatacaaaacagccgggcgtggtggcgggtgcctgtagtcccagctactcaggaggctgaagcaggagaatggtgtgaacccgggaggcggagcttgcagtgagcagagattgcaccactgcactccagcctgggcgacagagtgagactccatctcaaaaaaaaaaaaaaagaaagaaaaagaaatcatgtctacccaacatatttaaaaggcagcactggggaccacatcatgatatgggctgaaattttagcctcaaacatgcaaagggcaaaattcagtagaagtaaaagggacaaattaagagacttacaaacctggactcatcatctgtatttgctacttgatgcctgagagaacataggcaaaaaacatatcccccatctgcatcggtcatcttatctttaaaatgggcacagtcatctgcacttaaatatgttgtcacaaagaaaagggacaacgttgatcaagtgtttagcaaattttatggcacctagcactcaaaaattaatcataactattattgttatgtttataaaaatgaactagcctttaatttttatggttcctagtttttcccttggaaatagactcacaaaaatgaaaaaataaggttacaaaatatcatgtagaaagaactgtcatttgtaccagggaataaacacacacacacagtatgtctgtgtaaacatatactgtgtgtgtgtgtgtgtgtatatatatgtgtgtgtgtgtgtgtatatatgtatatatgtgtgtatatatgtatatatgtatatatatgtacatatatacatatatatgtgtatatatgtgcatatatatacacatatatatgtatatatgtacatatatatgtatatatatgtacatatatatacatatatatatacgtatatatatgtatatatatgtacatatatatacatatatatatacgtatatatatgtatatatatgtatgtggggggggggggtgcatataaagttagggaggatattctccaaagaattaacaggaacttcctctgggagatgagtttatggttgattttaattttattacatttgcttgactgtattttctaacatgaacttattactcataaagtgggtgatcggggagaggagctaacgttgaaaagaaaaatgggggagaggagctaacattgaaaagaaaaaagaaggaaactagctagagggcaagaaggcatggcatatgcatattcccagttgcaagtctttctgtctgttactaaacttggccctcccttgggttttgacaggattttttacccagatctccaccttggctgatgtgcaggagaatgtcatggaataccttcacgtgcttagccggcccaaagtcatcgaccaggagcatgatgtggtgtggaccgaagcttacattgacagcactgtgagtccacggggccctgggaaagaggctaagctttacccccatccccaaattgtgttaattccagaaaatagcaactgtatcactcttattttttgtgttcagtgacacttttcttgattgtttgtatagtgttggtcaccttgacaagcaaagttggtgaaaaatcataacgtactagaaagtatgacacgtacttcagaaaggtagctggtctgcacaaaagaaatcacgttttgcttgtcttttctcgttacttctgtcccactttttcacatgtgttcaaattctgtcagtgtagcaatgattacaagcattcttagattctgtcctcaccatatatgagccccagtcctggcaatgaatctttgtgtctcaattgggaatgtaaccaaagctcagctctaataatgaattggggccaccatggaggctacagttgcattttcttcccatgcataagtgagaatatgcttgaatggtggttcagtaggcactggattgttgtttgaactctgaccatgggcccattctaaagccgaattctaaacagcagattctgatgctgaattagctgaaaaggaggagctttgccaatcatcaagtaatggctcaatggctgggtttcttatgtaatctcagggtgatttttcatagtgataataagtctgatgggagtggtgtttttcatttattgattgtaagtgttctcacagggcctctctccagtcatttttgttgggattaacatcacattaatcactgtaacccagacacagctgtcctccagagtgatctcaatggctgtcatgggtcagcttttctctccctgggctctctcattcctgctgcacttctggcagctacaggcaaactcagggcaggaaaagcatgtgggaactcatttcaggggacaccatgacacaggccaggccacagcagcctgccccatctcagccttaaagtatgcaatgcggccctggaaataagaatgtatccccttgtcaaaaagggagactccttccccaggaaaagtcatcttgaataaagatgaatgttgagctgaaaaggcttctccgatgctagggagaccatgagcttttatcagcttgagtctgtccccagtttggttttaaatcatggaaacaaaataagctgccccatttatgttggcaccatattaacaatagcagccatggtgataacttcatcttttcttgtatgttgttgggtaaggcaggaaaaataggagtgaggaggaggaggagtgtggctagctagtattaaagtaaccaaatcactcagtggttttgtgtacaaaccccaaatagccagtttgttcagtcattttatttgtttcatcaatttaaaaaaatataagacacagtttctacaattaaaacattatggtagtagcacctggacagacagatcagtagagtagaaggtccaaaaaatcaactacatatggggatttagtatataatagaggtgatgtgtcagatcagtggggctaagatgggctttgtaatagatgcttttgggaaaatcagatagccatttagagaaaaatagaattagttcagtcttcacatcatacccaaggaagaaatccaagtggatcagacgtctaaattgtaaaaaatgaaaccattacaagcagtagaagaaaacctgggtaaattcctctgtgacctggattctgggaagactttaacaatgactgcaaaatctacaggcaataaagagaaagataaataagtttgactacaacttatttatcaacaacaaaaaaaaacttttgtaagccaaaaacacatcataagcaaagccaaaagacaaatgataaaataggagaaaatatttgtgacacatagtacacatgaagaattaataatctccaatatacaaagaactttttaaaattgaggagaaactcccaaaattgctataggaacaaaatgagcaaaaaagttgacaattcacaaaaaagaataaaaaatggcttttaaacataagatgtacaacttcataataagcaaaatgcaaattaaactataatgagataccatttcacacccatcagagtggcaaaaactaaaagcttaaccttgcactctgttggtgaggctatgggaaaagggacactcttattcattgattgtgggaatgcaaaatggggcaatctctatggaagttaatttgcatttaccctttgatccagcaatcttacttctaagaattcaaccctgaagatggacctttaacatcacaaaaatatatgcacaagtttgttctttgcagagcagcttgtaatttcaaaatatgggaagttacctaaatgcccaaacataagagattgaatagactatggtacctacacctaatggagtcaatattaaaaacaagaatgagaatgacctgcattagttgatagagagtgatttacagaatatacttctaagtaaaatgagcaaaatcacatatagcatactactttttgcaagaattatatatagcatactaccttttatataggaaatgaggaaaaaagaagatagatatgtaattacttactttacaaaaaaaaaaaagaaaaagcaaaaacaagaaacagaataaaccagaaaccaacagaactggttaccaacagaactatcattccctccccaagccatcttctctgcaccacctcccacatcttattaggatatgggaggtggtgcagggcttggggagaaaatgacacaactctgagtatacctttttgcacagttttgacttttgaaagcatatgaatgttctgtgtattcaaaaattaaacaagattggggggaaattaaaagtgaatgcaaacagaacaaaatgaatccaataatatttcaagtgaataaaaaatttctcagaaagggaggaaaaaaactttagaatatagtagtacacacaatattaaattttgaacacaatactttcactctctacccctcaatctagggaggaaaagagaactgcaaataaattctaaactccatttggtgtcatttgtggtaatatggttacagcaattctgaatccattttgtgagtatggaggtattgggcaaatgtgtaaatgctgaagacaggggatctgcctatgggattagacttgattggaaaatcccaactctgtctttctaaaggacctataagcagtggcacccaagtagcaatgagcccatccagtacccagattctggcttctaaaaaacactccccactaagaggagccagggacccttagagtaattgcttattccagggctgcagcagagaaggtaccaaataataataatgatgatgacaataataataataagcttggaatattttgtgccagaaactaaggaagtgctcaaaacaataatgtggtcatgtcaaaaggacacaggatcagcatgaagaggctctcattggtcaaatctgggacaatttgagcctcaaaataaggaatgacaataatggtttgtaacttgttgaataaaacagaaatccacatgtccttactgataataaataactaaacaaatcccaaacagatgaaccagatacgtaagtcagtgggtgagaagagtgcagtgtatgatggagtgctgactggcaaatgaggagggagtgatggagttggaaaatcactattttgcaaccattttggtaaagaccagttagggcaaaggtctgtcaatggatgctaaatctagggggaaagttcgatgatgagcagggtatttttatgacctcaaaatgcttccctagacttttcattagtcttgagggggaaaaagtggcacctgaacagtgggatactatgtacactgtcttagtatactatatattggatgaatctcagcaacatcttgagcgggtcctcaaaattagcaccaccaatgagaagcagatggacattgtgtgcctgcagagaaagacacatcacacttatgtattgttttgaccagggacacataacctgatgctcacggcagatataagttcatgaagcagatacagctttgcattaatatgatgccttgctttaggtaatgttcagcacttaaatcggttgttgtattagatttgctaattacatacagatataggaagttagagggggaacccattgctactcaaacttttgcgctgaagtacttttgtgaccacagagccaaaatatatggtctggggcagatctgggcatgtagttacagaggaaagtctctgaagtcttttgctttatcttaaacatttgcacaaattttacattctgtgccataatcattcttatttactttaaaataacatttcacgtggcccattactaagtaaacttggtatgccaagatgacagagctcatttattctacttcttaaagaactctttgaggttcataaaactaaacccacaaaatcaggttatccctaaaatgatagcccaacattgttgctgtgcttcccaaggttctgttgctgtatctttgcaaattgccctaataaatacatctcccggtagaatgttctgagggttccttctcctcttcatggtgttgagcaacctgtcaggccaggaagggcactggggagtctgtcttcctctttgttaggtctgccgggtgaagagaaggcagctgctgcttcaacaggtacctctgaccaggaagcagcagtttcttccagctccttatgtggacctggattctgccaggacacgaacaaacaaacaacaacaaaaccccatcatttatacggggtcaaaacagggttcacatggtgaactcatctgcagagtctaaattctgagatgcttaccaactttggaaccacccagaagatcaagggggagatgagcagttttgaatttatgactgtcctgacacatccaggacagtttcaagccagcattaccctaaggtgacccagcttgcagtaatgaaagagactagactccacgagcacttggcattaggaatgatgattgactccattttagtaacctgatgttttgttggtattgatagctctggatttttttttaagcatatttatcgtctaccttagtttattcactaagggcactgaatttaggttagaacagcatcccaggtttgaattgcatgcctactccatatttgctctgtgactttaagccagttacttagcctctttgagtatagttttcctcatttctaacatgagaatacgacctgccttccagggttcactctaaggattaaatgtctatgcatagtatgaatgcaataaatactatttattgtcatttcccaattttagaaaacctagtgtgagtttatttcctgggctgaaggaagtttttaaaaatactggattcttctttctttgagctgggtctcacatagtagctacatgattgttaccatattcataatagaacttggtagttaagtatgatgagtatcttggaaaacattgtttgtttaacgatactctttaattctttggaattcacttggctgtaattatgtgctgtgagccaggcactaatgtctgggggtgggtgcctgggtcagtgtccccagaaaacactgggattgtgccgcactagccaggcagaacctttcaccccaacacccttactgaggagagcccttgctgaattacacaaggaaagggaaatacggtagcagcccccttcaccctttgcccatttgccccgaaaatacttgctgccgacacttgcggctgcagctgttaacccgagataactttgccacaaaatatctcacttttattattatttttctataaatatcctataaagagaatgatgtcttctgtttcccaaaacattctgtttttagtagtggtatttacatttacaaaatatagtaattctcaatggctaaaaatgtcaaatcctagagaatgttgcattcctacacatgatgttaacatcattctcaaacagttgttggccaaagattcgtttgatgaatccgatttttccaaaataagcgattctgacgattcaaacaattttgatgttagttctgttttagaaataactccaagaacagtttttatattttattttcacattgaaaatcagtcagatttgcttcaacctcaaaaaccgtgtttatgcaaaattaaatgagtgctggcagcaagctgcactttttttgttgtttttctaaacgggaaaagggttaattggccacagcttaactgactcagtgtcagttaagcgcccttggcaatgcagccatttgtgcctgtcgcccacagcaccctggacatgtgatctggaaggccattctggtgcacgaagcatatgtctgttccccatgcttgagttgcaagcttacttgaagtcagttgtcttcattcccaaacctattgatgccagtggtaattttatcataattgtataaatgaattaaatattatttaaaccaacaaattgtgagtatgaaaagaaagtcattgtttctgtgaatctgtaaatgaatgctttggaaagactgtaaagaaagttgctaaaaaattaccactgtgctgaatacgggcaaagcaaccataaaaaactagggagaaaaaaaacatcttccttgcattcagagaaaactgatgcttaatttttctttccttctttctatagggtaattttccttgatttgtttgtgtcatccttggttgatgtggtggatctgggggctgggttagtgtctgctttttctcttattgtctcttagtggcctcgggcagctgtgtactccaagaaggagaacagatctttccagacacagagagaggggtcactaattggtgtgtgagcagctgtgatttccatctagaaacaaccaacacactcccattatgtgggtcagcatcacctgtatggctctgctagttctctactgccctttaacaaatcagcacagacttagtggctttaaacagcacaagtgtatcatctccaggttgccatggatcaaaagtctcagcacaagttaggtggatcctcagctcaggcactcacaaggctacaaggaagcgttggctgcactgcaggtctcatctgcaactcaggggcctcttctaagctcattcagcttgttggcagaattcagttctttgcccgtataggactgagttcccattttcttgcttgctgtcagctggggaccactcccagctcccaaaggccacccaaagttccttgccatgtggcccctgtaggctgtcacacaatgctgtttgttttcctccagcccagcaaaaatacatctctctgatgcttcactttcccttaaaagcttcttccattaagtcaggctgactcaggatcatttcttttttaattaactccaagtcaattgattagtaatctaattataccagggatatcccatcagcttacactcaaggagagggaatttgatggggtgtgtacttggggcagaaatcttgggggccatttttgaatcttgcctaccccagtggtctctgtccatgtgctctggtctgagagggaaagataatgccagaaggaaatgcaaccatatctcctgcaaactgtcaagagaaggttttaggatagctatgtccattcttcatcataacatttctacttagcactgatgtttcccagaggagcctggttctctttgttatattgcagtctgaaaggagctgtgattcctttaggaatcagaagatctgtgaccctgctgatgtgtattatttctactaaatactaagggagtaggtaagtatttgttgattatctagtatgtttggacacttgtacccaaaagatggcttaatatggtctgactcttctttctctgtaattatctgggtagttaaggaaaaggaattcctctttgcttgactcatcagtttttgtggctgaaaacccagcagcagtaaatataattatataactgatttaatgcttaaataaatagcttaaaaatgacccgtgagtatagtgctttcgctattaattatacattgatccatagttttggttctggacaagttcaagataaaagtttagctgtgaacagaagctgagtttgggttcttgcacatgagagccaatcattgcatttaaccaattctagaatcagaaactgacaaaacttcctttcagggcccattctccctgcttgttgctaccagtctgattaaatattctgtttcctgcttggctgttctgttcaatttgttttcctggtgaaatccaaataaatgacttaatgttaacaacattaattatgttgaatctaataagatctcatgtattaattgacaaaacagcaaacaccagaattctgaaattcataggcctctcatatgaatacaagtcatgcatagtcattatctcttaggtgcagagcaaaaaatcattaacaatggaatttgttccattttaaaagcaaatgacttgtgctttggagttgggtcttaatcagcttgggaatgctattcaacttgctgtgcaggatagaaccagtatcaaaccaaggaagcatcagcattcctgatcagcccctccaggggagtttacacagaccacagtgacacgcagaagggaagcaaagaaatgttttagaaacagtgggaatgtgaccatttaaaataatgagaattcattatcaagccctcttgcccctcccgtttgctggtaatgcaattcagtaggcaatttgtaggaacttttcaaaccaatttagttgcatttgcaaattggacctgtatccctccttctcagcccccactaagtccaacttggagaaaacactatgcatttgataaattgcacatttgtttcagtttcccatctaggaatggcacctaggccatttaggagtcatttgggtgattaagctataacctcttactgcctagaagcaattaaatggggtcaaagccatcctaaggatgttcttgggcttggaaatggaatttacagtatttttccaagacactgctgcatatcaaagaagttccaatcgtcaaaacaaagagacacacgtaaagagaaacataaaccatcctgctgggttgtggaacagagaatgccatctgcattacatggcaaggaggaaactgattatgttgggacctctatttcatagcagatgggttcattaaatttaatagcctccagagcctttagaaaccgtgttaaaaacatgtggagcatgctgtgacacttcacttctggccccgcagtcattataactctggcacagactataaatattacagtactttatttccattgaaacagattactgttatgattatttttttccaggagatgttaaaaatatgagtgtattcctgatttttggtaccacttatatgcatccaaatattttcctcttccattgattctagagttttctattaaacagagttggtattataaaaccatgaattgatgatataaaattattatcttcagaaaagatgtcctaaaactctatatgggtgactgtcaactagtagaaaagcttagggctaaaaatgaaaatgatttctagatttcaggtgtttattgttgtttctgcttttatggattaatgatttgcaactgtctgtaatgaaagaacagcctctatcctctgccatacaccaatggataagagcatctagcctgaataatcatacaacatgatggcttattcagcactctttgtttacaagtcacagcttccagtgcaaagtgggaatggtcaaaaaggcaatttgatgactcttggaaccaggatgtctgtgcagttctgtcttgaggcgtgactagattcaggggttgtattagtttcttctcgcatcactattaatataaagaactacccgagactgagactgggtaatttataacgaaaagaggtttaattggctcagggttccgcaggctatgtaggaagcatggctgaggaggcctcaggaaacttacaatcatcgtggaaggcaaaggggaagcaggcatgtcctatatgactggagcaggaggaagagagagagtggggaggtgctacacacttttgagcaaccagatctcgtgagcactcactcactctcaggagaacagcaagggcggacatctgcacccatgatccagtcaactcccagcaggccacttctccaacaccgggggttacaatttgatacaagatttgggtggggacatagacccaaaccatatcaggggttaatcccaatattattttgacttgctctttgactatttttttttttttttttttttttgaaatggagtctcactctgtcgcccaggctggagtgcagtggtacgatcttggctcactgcaacttctgcctcctgagttcaagtgattctcctgccttagcctcctgagtagctgggattacaggcgcccgccaccacacctggctaactttttgtatttttagtagagacagggtttcaccatactggccaggctggtctcgaactcctgaccttgtgatctgcctgccttagcctcccaaagtgctgggattacagatgtgagccaccacgcccggccactgttccttgactcttattggcttaattcccagacaggatctctctacatggtgccaaaaatggctctactgtttttggtatctaacataatgttgttaactttcattacatttataaaccttaatttatttgcctttcagcatttatattaagcctatgatagataggcctgtttgagtcacagccaaacgttgagagatgagacagacctatgacttaatggcctcaatctcacagagtgaggagaaatcaatccaaaaggaaattgatcctgggaagaccgagaagtaccagagtcctgcacaaaacttgttggtagaatccgaaaccaatccacgcctaagatcatgtaccacatcagcagggtattaattatgataccatactgttaagctatggagccctttagttaaatgtctttgtggaccctttcatataaagcatatagaagcagaggtcctctggtaggtattgggaaatggagacacgaagcccagttgcttggccacatcccagggagactctgaagcattgttttcatctttccttgcactgcagagcctaggtagtattctaagtaatcaggtgtcaacctctgagaatagtcgtataggattctctgctgtggattctctgttgtaccctttagtttacaacagagtgctgggttgagtccagttaggaaagatggctatggggattggcaggttgtgtctgtattcaaaaatcaaattgagaaagttagtatagtaatatgactattttatcatatttcggccttatttttcttcatcacttctgatgatcaaacactggctcattgtacttctgtcacctcttagaaagcattggctgtaggcaagagaacccactcaagctgtgagaaatttactggatggctcaggggcagccccaggagggataaggaccatcaaggagcaagaagccaccaagagcaaatgaccactctttttgttctttcttccttcttcctttgttcttttttcttgtccctcctacttgccatccccagtcatcggtgaaacacagtttcctggtctcctcccagtcctggctttacataatgccccagttgagatccaaaaaggatgaaatcagtgtgtgttgtgtatctgagtttacatttctgagcaaattatatacacaactcactctagcccatggttccattgaggtcagatgtccatcatttatccaatcagttatgtcccagaaggccaagggatagaaacagatcagccagggctatggataacattttctaagaggtcgggaggctgcctgcagtggcttatacctgtaattccagcacttagcgaggcttaggcaggagaattgcttgagcctaggagttggagatgggcaacatagtgagaccccctgtcgctacaaaaaataaattgaagaaatcagccaggcacagtggaatgtgcctgtggtcccagctcctcggaaggctgaggtgggaggatcacttgagccctggagatcaaggctgcagtgagccatgactgcaccactgcactctagcctgggcaacagagtgagaccctgtctccaatttaaaaaaacaaaacagcaaccaaacaaagacaaaacaacaaaacaaaacagtaacaacaacaaaagaggcctggataggaggaaatgcctagagtctgaaggagttggcatttctagacctctgtctttctgtctgaggtttctgtaacttacagcccggctgagctctgatcctaactctcaggagtgggtcttctttcctattctctgagccccaggctcacatcctcctttaagccccagtggacccaagtgtccccacagcctccccctggccccacatcctggaggatgctgcccttcctccatagactatccctgctgtgtgggtggtgggaagccctctcccttgtgccttccgagagctgaggaagatattttggccaacacaaccaaatctgtactgcttttcccccacttcatggcccagatatttgggtaacttaacttctcagagctgattctcatgctttgacatggtttagactaaaatgaacacattcctcttattaccagcatgaagaacaattaaaataatcccagagaatcagcctgtggtttgatatcagctgccagtttctcttctgttactgtacacaggattttctccatgtgaaagatttcattctttcacctttactccaaaagaatcgatgtgccaaatataaatgtgttatctatgaggccatggcacaaagacaccataggtaaggacatttcacctgacttggcctcttagcctgcttctatttaaaagtagcagagaatcactcttgcctcccctgccttcatgacctttcacacccacttatgagtgaaatggccattgagggctcctcctaaccttactctgctggtgacacatgctcttattagacgtacagagcagacatgactaagtctatctctcagtgcaaggtccttaggagaaatttctctcttgttctgaacaaagaaaggaaaagcaaagccagtagtttattcaggcagaaggaacatgcttttaaatcaattttcattatgtttaatctaaaaatctggaacatcaacatcttttctggttgatagaaacaactattaaacacgcttgtcattgatttctcttctgaagtgatcaaattaaaggcagcccaagatgaagcaaggctggagtactcatcctatagtctgtttctctgtcacttagccagctgttaaaggagcagttgtttccatggaaagagccttcctttgaggaacatggggttcaatggacccccatggtattccaatagcagggaccagtgggaaacactgtccacacaccttataagtgcagggacatcttgagaccacattagatgactttttctgtctgcctctggaaaatatttgaagacccaatttgaaaagttttcataaataattgagctattttaattgtcaactaataagttagagaatctaaaggctcactgctggcttaagtaggatcaccacgggcttaaaaccctccaggggagcctaaattcagagcatttgaagaccttgatgacctgactccagtgaacatctcagtcttttccttccacatggcagaaggcaaaggggaagcaggcacgtcctacgtggctggagcagaaggaagagagagagtggggagctgctacacacttttaaacaaccagatcttatgaccactcactcactgtgaggagaacagcaaggggggacatcagcagcaatgatccagtcacctcccggcaggccccttctccaacattgggggttacagtttgaatggggcctttccccattccgtgccgccatcctccagccttaacctactcacacatttatagtctctagaaccagccctgtattctctcacaccgagaccactgtacctgcttttctctctgcaggaagtgatctcttcctcccactccattcagaagcctctgggcttatcctttggtctcagtttcatcatctcctctgacctccttggatggacctccagtctagagtggggcattgatggcctgtttccaaagcatgtagcaccatcctagaacttcttgtactattatattaagaagtccaaataaactttttgccactgaactttaaattccttgaggagagggatggtgtctggttaactgtcgcatcctcaatatatgatcaggcacgtagtaagtatatgtatagaatcagatgtgtaaatctcatagactcagagatccaaaggttggagggcatgtgaaaatatctgcgttttctagctgttagataagaatggcatcttctccaacatttcactcagcatgtagcatccttgctcaaggccatcttcattaggcatgtgatgagtggatgcatcttcaccatgagactgggcttctctctcaggtacccagcaccaccaatccaacaaagattttgccacattcatcaaaaagatctgaattcatgtgtccacggtttgaggagctaagataatggcattctgacatatcagctgtgtcattgttaagataaaattgatattacttttgcccaccgttatgatgttacttttgcccactgttacaacagaagggcttttttttttgagacagagtctccttctgttgcccaggctggagtgcagtggcacaacctcagctcactgcaacctccacctcccaggctcaagtgattctcctgcctcagcctcccaagtagttgggactacaaggtgtgtgccactacgcccagctaatttgtgtatttttagtagagacgaggtttcaccatgttgaacaggctggtcttgaactcctcaccttaggtgatccacccaccttggcctcccgaagtgctgagattacaggtgtgagctaccactcctggcccagaatggaatttttaaacaagattttggcaagattggaatcaaatctggctgtcaagtaatgggcattcaggaaatccttgaaaataatcccttacagttgtacttgtaatgtgcttttttctgtatttcccccaagttcttaccatggtcaatagtgcctcaccatcgctggccattctccctcactctcagaacatcagctgtgctggtcaccttttagttgcctgaacaacccaaactttctccctcccctgggcttttgaacattcttctccttctgaactggaaagactcccctgctgctctgcttctctactggggaagaggctctttcccatgttctttgtctcagctaaaatgtgtccattgcctttccatctcaggtcccctataggttttcttcatagagattatgatcatttagaattatcttaattaggtgctttgacttttccctctcttttaaaattcttgttttgtctatctcttgaacagtagcgtaaggactggggcagtctgtgatgtgtctctataacctgatactgtgcctagcacagagtaagtacccaggatgaattcagagaggccaagtggcttgctctcagtcctaccaccagtctctgtttactgtgcactacagtttgtttgtttctccctgtctgtactatacttttcctaaaaaacggtacaatgagaccccaaggcttacagaagaaataatataaagaatattgctacaacatggatggtggtactaagagagagtctaaaatattgtctccaaaatgcatgtgtcatatttgtctttccttttgaaaacctagctgaatgatcaagtttaggtctgaagcaactgacttttatgaatgccacctccatctaagcagcagttactgattttgaaggaagaacagggacatttgggggatgaaccacatttctgcagtgctccttttctgtgcatgttgctaaatgcaatatgttggggaaaagattgattgcttaaggcatattgtttatactgtattacttgggtctgatggaaaagttcctaacagtggttttcttgctaaagatatggtttatggggaagtgtggaatgtgattttttggtgggacatcatcatgatttaggtgaactccagagaaatttgatactgggagaggccaggaaaaacatgcaggtccatgaagcttctttagcattagccctcagttcttcatcagattgtaaatgctctctgcttttaattaccatccttattcaggccaagctaattgctctgggccagactggaaaggaaaattcccagaaagcctgatatcttgatagaatggtagtgagtttcctgaagaagacgctaagaaatccttaatgaattagcatttcaacttttgtaacagtatactaaaggagtgggggggttggaatcatagatttttgacagctgtttgccatcatagcacttgacaatctgcttcttatttggctttctggtatgtaaaagcatgaaattctcaagaagtattgatcactgtatgacaatacgtatgtaacaaaactgtattgaaaaaactttcttttaaaaatgatattcctatttggttactaaaatgtgtgggtctttttatttagaaaatgttgtggttttgttaaacataagttatttaagggttaaaataatcttaattttaactattaatgttactgagaacagattttcaaccaagtacaactgagtgcaaacaggaacaaacttggaaaagaagattagtggttgggaatgcagagacacagcaagggctgggccttggccacagtacatacattcacagaggccctttgctatattagcagagccagacatttttgtaaggtctggtgatttccccagacttcatggaatctagattaagtttgccaatttcccatttctctggagatgataatccaacatagggctgaattaggaacactcagaatgtgtgggcttgatggttctcttattaagctggattgcccttctctgtctgtagctggtcagtaaacaggagagtctactctttggccatcagtgttctagggacacttgcagaaccagatgtaaagttacctagttcattgacaaaagacatctactgagctaaagattagtccctatgctggccaatgggataagtgttcatttttaggaaatacagcctaagtccttgcagtgaacaatccaagccaattcggtaatttgtacatgttaaaatatttttagtagttattggcatcctccaacatttagcagtgaggctgtaacaagtctcaggccaattctgccatctatgcagatatttattagcaagtatgcacaaaagccaactgttttaaagctcaaggaggttccagctctttatccttcaggtgttctgatggccccttgcatcagagcaaatgcattatttgcaagagtcagctaacgttctatttggagtcaggtaactgagaggcctgagtcagcagctgaaggcaagactgtttaaaaatctggccagggggcactatttctaaagatagagctcccaaagtacttatttgggtgtttgcagagaaaggcaaggctcctgcagcatattgaaccaatccacagagtggatatgtccagttttaccagtaagagttcacttctaatatccattgtggtaattgagaaaatttttggtgttggtcagagataaatacccatagcacatgcaaccatttgtttaaatactagctggaaggtatattcctaatgaggtcaattgaccatttttgatatatagactaaaattagcattcacatttgtatcaaaacatctactctgaagtattctacagtaaattccatagcatataacaatgctgtattatatactgttaaggtttcttttgtgaaatggaaagaatagtggtggtgatctcatagaattgtgaagatttaaaaacataatattgtttagcactatgccacgcctatatcaagtgctcaataagtgctaatcattattatgtagaaattcaggataacattattacttattgttccatatagagtttttgtggagtgaattcttccttcgttttattttggacttgccaagttctgacactctccaaaagaaaagggaaaagactgggccatgcatgtgtttcccttcccagcagaagagcattcagagtcatcttcactctttgcggtcaaggcccctgctgtaggtcgtgtgtccagcttgtcctgcctaaaagcatcatgccatgcttgagaaaaagaaaaaaaaaagtctactgaagccatcacctctccttgtctcaaaagactttatgactacatcatttagaaacgactagagtaagaaccaagaagcttgagaggaaaggctgagctgtgcaaattgatgatgcacttctgaagcatccttcctaacggtggagtagggcaggtgtcatctgagtagcacagcaagaataactggggtactaagagctgccattatggggcaggtaaaacgcacaccagaccctgtgttacgagcttttgcatgtgtcagataggccctattatctccatttacttgatgaggaagctgaggtttagagagattgaggattttgcctaaggaaatgggataattcatggaacaaatggaattcaaccttgggtcttctgcccaggtgtgagactgtgacctcagattccatgttacatgcaagaaggtctcctgcatacgtgtgtgtcctctgaggccgcttttaaggaactgccaaagtctttagaatgcctaatgggagattagaaatgttgttcctgttcccacaagtttgagttatatcacctctactgaattaaaaaaaacccatggtacccactttgagatatgaaaacactggagccagccgggcacggtggctcacacctgtaatcccagcactttgggaggccaaggcaggcagatcacttgaggtcaggagttcaaaaccagcctggccaacatggcgaaaccccatctctactaaaaatacaaaaattagccgggcatggtgccgtgtgcctgtaatcccagctactcgggagactgaggcaggagaatcacttgaacccgggaggtggaggttgcagtgagccgagatcgtgccactgcactccagcctgggtgaccgagtaagactccatctcaaataaataaataaataaataaaaataaaaataaaaataaataatgaaaactctggaacctaacttgtcctgaattatgtttcccatagccttggcaacccaaggtaggaaactttaaattttgcaacatgtatctcttacatggagagttctctgtgctatattaaatgacagaaggaaaactcagctcatcacacttgtaaaagaaaccacagcattcctaggtttaaatgttgagtcataacaattctatttgatgggcttttaaatatcttggaatttgcattttgaatgtgttaaacatcacaaaaggattttgatggtgttatcacagcaaatactgtaatcacatcctataatttatataaccccaactgctgtcagtatgtcaaaaatcatgaaatgttattcatgatacacacaacttctctactgaaggaaattgagggtcctgaatcaaattccttgagggcatttttaatgactttgtatggtaagtctgtccactgtgaagggtagtcaggcaagtcaagcagtgggttaataagtagatcaaagcttcaaatactcagttgaacaagccaaggtgtccggaaggcaggccagggcagagaggtagacctctgaacggaagcaagtttagcagcctgggaacacctgcattgcagagtgcagcagtgatctgcggctcgtgctggaggccttccaggaagcaggccaattaaccttggggctaagagttggtatcttttagaaaccttgcctctggtctgaacttttgtacccagactactctagatgggggccggaaggagaagccgtgacattgtcagactttttttttttaataaccgaactctgttttgctccccccaaatagtcactttgtcttattaaagaagagatgatcaaatgtaacctcatccctccatgcacaattatttgcaaatgttcacctccaaatcagtcttatattcaaacatagtaccaaacttctgcaggaaaggagttggggccatcaagatgtgaaaggtgtagggagtccagtgcagagttgcaatgaaagaggggaagaacagaaatgttccgtagaagaagatgggacaaatgaaaagagcaagtttgcctcctgagagaagagggagcagcagacttcgtgagcaggcaggggacctgaccccagatgggcaaagtgacaggatcttttcaagagcaaggatagctcctatttaatttcatgctatttgctctgctatagtgaaaacctctgcaccttcctgaaagtccaccacattttcacaaaggcctccaagagtggtttttggaggacatcatgggaagttttagttttgtacctctctacactcttgggaagggggccagagagtgtgcattaggatggtgaggtagtttacaaacagaacaaatctagcaggagctcagaaccagagtaactgcacagctgcaaacaccatccttccgcaggaccacagtagccaccagcagagccatggagcttcttcccacatgggattggttgggataagttactgctagtcccattgttagaatatcttgactgaaagatatgtttctgccaaatgttcaataggttataaaatgcagtgattttaaaaagggtcagaagatgtccattttgattttttttctcccctcctatgttatgtaacatctgctcctcagcttctccaattgaagaatgggaagattggccttcattaggagatctcaaaaatctgacatccagccatgtgtgaatttcaagcagtctgtgatccctcccatcaaaacttgtacatgtgcatgtcttattatttcattttatttattttttttggtagaggaggctgtcatcctccaaaatgttaagaactatgggaacagatctcttatgtttagtctagctatatgggcctctcttgttttcttttgttgtaaattgcttctctttgtctacctaaatgacaagcaaaatacatgaattattttctgtagggaaattgagaagccaacaagcctgaatgcaaatcctgcatgacatgtcttattgtacagaaatgtcagtgactaggagagagacaaatccactgaagacagccttggttggtaccaaaagatagtggcccagatccttgttatatcttgtccctggtaaatgaggcaaacaccatgtcactgggtttgagacacaagtcctattgattccactctcagtatacatctcatatattttcccttcttatcattagcaatgtgccatctaccctgtctcctgcctggaacatccctgcagacttctaagtgatcttttgggttcactcttaacacttccagccttctccctgccattattttagttcctgggaggtgagcacccagccaccctctgccatcatggtcctttcttgtttcctggctaacacttacctaatctttatgtttcaagttacaaatcccttccctaactcctcaaatagaaagggaccacctattactctctcatagaaccacttcttgttcttgttagcacttagcacagcttattattattacgtattgcttgggctatttttaaattatgcgtggtaactctagagtaacggtcactaaaataaagtctgggtcactaactgacatttttttgtttaccactctgttcccagtacctaacacagtaccatacaaatggtaatatggatgaatgaatggtaaaatagtgtccacttgggagaacctgattttactcttgttatagttgaatctatttacctaatgcttctgcagtcctttaagtctctttttaagtactgcctcttctggagtcccctccctgcactggctccatgggccagttattatacaatacagtatggttatctttatttactcctgtgtctcttcactttgtaagcatcccaggactgaatcatgcccaagtctctcatgtccacagtcttccttggcctaggctttatagatatttggtaggtaaataaatagcaaataactatattattagtcctgataagtttaaatcttaaaaaactgtgaatgtaatgcacttatcacttagctataacctagttgataaacagtatgtaatttcacacccatctgatttatccatggttaaaaaaacacacaactgattttacatatggaatgttgaaactgggagcacatacggtgacacctcagagagcctgcatcttacatatctttgcatgtggctcacatgcccaatactcctataaatgtttgttgtgtgagtgaatgagtccatgaatgtatgacttcaacttgctatcacttttggtattagattttcaaatttcccaacatggagatatggaagccattgttatttgaaataactctgtgtttgttactcattttagttagcaacaaaaagatgaaaacgatcaaattttaccattcccacatgtttcagagcttttcccttcttgtggttgtttcctgaacacacatatttgagggaatattcagtactcataacgcgtttaaagacaattgccttgagttttggagcaattgaattctgaaatagctcatttgtattagttataggtaagaagctatccagataacaatacagtctgattctgttggtgtaaaccaccttatcagttgaaattcattgcttcataaaatcatttaagccccctcatatattaatttagatcaccgttaggattttttaaaaaaatctaaatcatgatgtatcttttattttccttaagaatctggaccagaagcacaattgatttcttcacatgaaactggaaggtagctgttctaggggagaaaggaaacttttcatctaccctcttagattcagtgaccaaagctgattaattaaactgacaaaaacagattattaggagaaaggtttatttcatatgcacatggggggccacacaggaaagaagtgaaaactttaaaaattagttaggcctttgagtttatatactgttttaacaaagggtaataaattatggagaagtgacaagacaaaggaaaggaggtttaggcttctaggggtggcacattgtgggaaggtaaatagggaagacaaatggatgataaggattatttagtaaagtttgctatgcagacgaaagttagtgctgtttccagtgataagagttattgcctcttcctggtacaggagaggggaaggcaaaccttcacaacaggaaatttgtgtccaaattttaggcagaaaaggtaaaggacacataattcctcctgcatctgctctttctcagttgccttcagctgaaaataatctttatgacaaagtggcatattttggggtggcatattctgatccctgtcactgtttatagtcttccacttattagcaacttcctaatcattgctgttggcttctgatggccgccattttatactgctctgtccccaatactgttactgcatttatatacatttccttattaattagcatcctgctgtattctgtgacttcatattttcttttatcttttaactgagtaatctcatctgtcagtcatgatattactgtgggtcataagggtttgaaaaccttttaccttttttgtaccagtgttggacatggtaatcttaaggaaggctgttcctcaatatagcctgttgaggtgaacatgtttggctgattttcttaactggttttgtctaatattccttgcctgattgttcaagatgtctcaccaccagtccgtgactaagtgtgggggaagatctgtcagggcacccagacaccttagagccccaagtctctagatgtcttctttgtggtaattaccttcctcttagtatccattcaaggagccagtcggaggtgtccaaaaaatcacttttgaaactctccaaatgaggagtggaaagcctggggatactgaggaactgacctttgtccctttcaacttggtgctatcagtgaccacaccccagaatttctgaggctccttgacaactcaatggacattgacgaaagaagtttgaagactgaggctccagcctgtgctctgccatgtgcccttatataaatcacttcctttttctgggtccaagtttctctacttcattgggtcaggtgctataaaatttatattgtataacaaagttaaagtgctgatactgtgaatatttaaaatattcatgtgaagataatcattgcagtaatgactcagtgggttgaatttgcctactctaagtattcttaggtattcatttctaaaatatttctccagaaattcttagtacctggtatgtaggagacatttaataagttttgttgagtgaaaagaaaaccttacctttccctgggttcatgcattgttgattgagcggccaaaaataatgataaaaattacagctgcatttattgaatgctcacagttggccaggcacagttcaaagagattaacacataactatatgtcaagaatatttctaaataaatgtaacattaatattttatttaaatataagcatatcattaagtataaatatataacagtcttatgagataggtattattgttatccctattttcagatgataaaactgaggcattgaataattgaataactttcccaaatatctattccaagatatgtgttttaaaaaaactgtgtcctttctgagtagaatgcaaatgttcaaaaataaaactggtgagttattaaagcattaagacatttgccctttatctgaataatccctggcttgtcctttgctgaaactttgagcagcatgatgttggaattcctttatgataaccaagtggagattcctgacaccgtaaaggtatgatcatgtgcttggtgctgaataaagtttgtgagcacagccaaggcccaaatgcttctcagatctgtgtgcactaccatattcagtaagtaggctgggaaaatccatgaagctatttccaaaatcaaactgttttgccaagcttgctttctctcctcttaattgtgaacccagggttatttggacggaaagttgatctatgcctctgtttcatttactcattactcattaaactgctatttaattctaggtatatgagttgtcagagctttctctaaagctcctctaaaccaaaatttagattttggattgaggcagtgttcactgaggccagtttggctcacatctaaagtgagcccgagcttaaaatgagctggggcttgagggatctccaggtcaggccgagcaagttaaggtgacacaggctgtttcaggggtcagagcccattcctctgttttgagattcaccctctgtgttctcccaaagaattgcaatatggagctattcgagaaagagtcaaataaacatcttgtataatgaggaatgatttcactttccttcctacttaggtatttatgtcacttatggagtgattcctggattacactttcctggctggagtgtactagggtagttaggaacacaggccctggagccagaggacccggtttcaaatgcttgctttgccacttagcagctgtgccatctgagacagcttgcataacccttctgtgctttttatcacatataaaagggggataatgatagatactgcctggcttgcttgttgtcagggtaactggtgcggtgtcctctcctagggacctgccttctcccctctcatctgctggtgctgtggcagccaaagtagggttgcctgctgctattgcaaagcaacagtctaacacgtacatactgtttagcatccatgtgaaaaggaaaaggttcccatgagccaagctggtgaagtaagtgtgcagagaagactgagtataacacaatgggggtaagggtatatgtgacctatatgtagcatgcatgtgtcatctaaaggtatttgtttcacaaactttaaaaacagctagggccaaatgaaactctacaggtgcaccttctaggtgctcggaattcctgatgcctgattatgccattcacaccttttcctgtactccagaacttcaacagctagaatagcagcagaacacatctcaatctctctatacctagagcccaccttccaagttcattgtcactcgcacctctggagcctgatcatgcttgagcctgagcccctagtgactcactgagctggtgctgtcactgtgtgccctcctacagtccaccatccagaaggggcttttctttcttggccatgctcagggctgtcactattgctaggcagtgtcagtcaaggtgaaaaggattgtggagtttcaggttgagtttgccctgaaaagcaccatctccacagtcagaaattctcacttctgtggtgtctcctgctgtgcactattaaccagcccattggcctatcggtacttcatttccctgtctgattttggcaccttctttgtatttttttttttaactttctgttatgggtagtctatggatgttcctccaagaagagtttctttctctgagctctgctcactcagcagaatgcctccacatgacagatgcctgggaaacatgtcctaatcaattgattccatcttaggtccatcaccaggaatttgctaacatccgtgtgcatatgacattatatgaggactgatacagatgtgggttacacccatttattattatttctcaatgttcagtaggaatataaagggttcccagagggtgtaagaaccaccttagaccctgagaaacaagggcagatgtattcagagcagatgcaaagacagaaatatggagggaaaataacaaggaagagaaatgcaagctaagttcatatgtgattagacattttccatttttagcctcatggcttacatttgcataattcttttaaaaagaaaaattaattatttatgactctagcttttaaccaaaccgtgcatttaaagtaatcactctgggtaatttaaataaaatcttttctgtaaatagtttatgctcattagaatgagaaaactgttggtttattcaattaaaaggacattattgccagtttggattctctctctttttttccacttcaaaacagagggcagtcacattgagacagatgggacttaattaagttgtctcaaaagtaaccagattttgctttaaaaaaaaatttaaagaggacagattccagaagacttttcaaaaaccagatcaccattttagagttctgaagtttttaccctttactctgatggatagtcagtacaaacataagtttgtttcctggcaagcatgtaggacttttcacatgagcccagcagcaatcagagaagatggttctaaacaaagctctgccctactgtgatctgtaaagaatgcaaaaacaatgaacctgcttggtgcttctgaatgtaggtaacaccattcactatggtaaagaggcttttccaaagaagccatctgtattttcaggatattattatcttttgtttactggttagttccctgaatatccatggttcgtgacagctcctggagagtgtgacacctgagtgttttcccagaacatggcaggtgtgtagctctgcactgaagggtgagcaggcaactgatgcctgaggtctatgtttggccctcctttgctgtaacatgaacagtgttacagtaattctgattgaattgggatcagggagccctctcactcagtccctttggttcacctgtggcatgcagaattttgggactccatagagcagagttcatgaaccactggaatagataacttataatatgttgacatagtgaatcaggcttctttggctgtgacagaattccaggttggccagacttgtgtgattaaggaaaatcaattgaatcataaaactgaaatgtcaaagtatagcactaccttcaggtgtggctagctctaggtggccaaatgctgtcaggaatctgcctcttgccatctcttggctctgttttcctctgtgtggttttattttcagatgaggctttttcccctgtgtgcagtcaagatcgtcatcagcagctccagatttttatcctaccagtatagccctctgccctcagaagaaagaaatccgtttcctcatggttccagctaaagccctggtgcccacactcagggattttaccacctgcttatctctaactgaaccagtcatgtggtcagcaagatggagagttctgattggccaggcaggagtcgcgtgtctacccttggatttaagggaaggtggagtcagctccttccaactgcaaaatctgagagtaggggctgggttttacctcaaaggcaaatcaaaatgctgttgccaaaaggagggacagattcagtgcaggcaaaaaactgctgttttctacagactccttttagatagaacagcctatgagcctaagcaaaacctgttacttttcttctacatccatggagattttgtttatgtccagtgatgggagacttatacctctgaagaaaagaaactgatgtttgtataaagaggaaaaggactggggagtgagggagagtagaggagatgacagaaaatagaaaatgccaacccatctcaaccatccaaagttcagtcatctttctaggaaggaagtgaataaattatattttttcctgtcgtcgtaaatacttgttggtttaccacccgatatctcctgtgagaagtgaagtgagagccaagactgtaacaggttttatccctttacttcctgtgctctgtgcaactgtttggcaagggttttttaagctcttgtttcaaccaacttctgtctaaatgcccagaattcgtggctgtttgagctacttaagcttttcaaatgtaggcaatggggatatatctgtgcgagaggtttaataatgagatggtttggcctgtgtggcctcagcataccaaatcttcatctcaaatgtctttcagagagagacagagtaacggggtcaggttagagcagcaaccactcttggtgatgatggggcaaaagcctcttacagccctcgcctagaactctaatggatgaggccatcccccacgtaactccctttgtctaggtcagtgtagtgcagtggctttgtagagaaagctgggttgtatttgtttgtcgggttttaataatgctgatgtaataaaatgagttgggatgtatttccttctttattttctaaaacatgtttttgttagattgctgtatttcttcttgaatgtttgttagaattcattaatgaaactatttgagcctggagctttctttgtggggaagttcctcattccaaattcattttcttttgtagatatagggctatttagattttttatttcttaatatcaatttttctcatttgtgttacaaggagtttgttcatttcatctaagttattgatttattggcataaagatgttcataatattctcttagatttcttttaatgtcttcaagatctatggtgataactcctctttccttgatatataagagcaaattttatatataatgatcacacatatatacatgcatgtatctatatattatgtttttattctttttctacatcattttgaattgaatgttttaacttccattttatctccacttctgacccaataatagctacacctcttagttgtttcttttgagtgattgttaattatttgtgcctttaacttctcacagtctaccttacttatagtggaagaaacttacaacagtatacctgcaatgcccccctttcacactatacgctattattaagatactttttacttccacatatgttataaacctcacaatacattgtttttattttgcttcaaatagttaataaagtgaggaagaaatcttatagttacccacatgtttttcatttctggtgctatttattcttttggatatactcaagcttccaattggaataatttttcttcagtctgaagaatttcctttaatttttcctatagttcacctctgctggcagtgagttctctcagatatattttttttttttttggtatgaaagcatttctactttgccttcttttagagtgttattttcactagatacagaattctagtttacagttgttttcttataatacttgaaagtggctgctctagggtcatttggcttgtattctttttgacgggaagtcactgataattcttactcgtcatcccctaaacctatgtgcctttattttattagctgcttaagattttgttgttatgatatgttttcagcagtattacacagtgccttggtattgttttctttttgtttatttttcttgaggttcattaaccttcttggattggtgggtttataatttttatcaaactaaagatatttagtcattatttcttcagatattttatttgttctgcactgctccaaaaccatcctggacttttaactgcacatttattcatctacttgatattatcctactggttactgaagttatttttcaacttttttttctctgtgtgcttcatttcttattgtttctattgctgtgtcttcaggccgattacttcttctgccatgtctcatcctttgttagacccatacagtcacttttaaaaaattttaagtattgtatttttaaactttaggagttccatttggttttggtttttattggtttttgatttggcttttaatttttatttatccctttattgtgttcatgttttcttttaagtcttttattaaattttagcagctaatttaaagtctgtgtttgtgaattttatcatttctgtgtatatgttacctattgattgttttaccacttatgagtcacattttcccatttatatagtaatttttgaacagataatgagcataatgacattgtgatggtgggcattatgtttctgagtgtctggattttgtctattttaaaggaatgttgagttttgttctggcagtcagttaacttacctatatatcaccttggcccttaaaaagcttgtttctaagtcttgattaggtgggtatggcatatctttcactctaaggcaaccattttgttgctcaattattgagaatccaattggcatttggatttctctagtttttaaatgtgaacttcagaagcaaatctgcctctttgaggtttgggcccaagagccactgataagacctgactttctatactaagagaaaaaactcccattgaattgtaaacaccagtaggaaataccgatatttgttaagagttactctatttcatgatttaattgtaaattaatcaacggcaggaaaaattccactgaaaatacacatagatttcaaaatcataggaacatgtgtttggcaaagtgtgcttgaagattgccaaaccccagacttgggggctggggaacaaaatgtagtttgagagaatcagcaatcccagcatattaacagacctccctttcacataggaccaaaataagcctgaagtggtatggtagtcagtgtgtcagcaggcttgagtggagaacaaagctctttgctagtctacaaggagaccacttcatttttatttttaccttgtattcccttcattatccattaacagagtactttaagtttttagggaaagagcagccagactatttgacttgattatactatcagatcaaaaaacaggctttggagtcagtctcagtgtcctcatttgcagagtgaagatgattgtacttgaaccctagagttctcagggggctttctgtgagcatgcatagatcccttagcacctggcctgccttggagtaagcactcagcttgtgtgagttctcattgttagccactggatccagtcttgactttgagaagtgcttatgtgcacaaagagaactaatatcaggcaacacatggctttggtagttctttctctggcccagtgaacataatatatatttaccaatgggccaaggtaaaaacaatatgtaagagaatgaaatgttcataaattttcccaagaaaagaacttcacttagactagaatcacagcattcttcacagactaaaattatagagctgaaagttccctgaaggattctctaatcaggagcatctcacagaggactgtctgtctcccacagctcacacctctactctggactggccatttactgtgttcacttccgtgagacacagacttcatggataaaagagctacatagtcacttacttttatttaatagcttattacgtttttcataggagtaaggaaatggaaggacaaaattgaacctttcagtttacatagagatagggctgccacagagctccgtgtgaaggcatcatttcatcagctgtatcagctgttttcaagagcaacagggaacccattcttctggagatgcttctccagagctgtcttctgaattatacccctaagccacttagttagagcagacagctttttaacatgggattctttaagatcatctttcaagtgaccctagaagatggactgttgtcatcagaccacttgtgatttgctaaatgatgctctctgtcttgaaggcagccattggtaaatttacactggaacaagctaaagtgacattgtgtcttttgtttctagggtaagttctagatcaacaagagacacagggttgtctttcttcccctggctgatgatatactgagacagtgtttcccaggaatgtatctctctttgttcaggaatgttctaacagtaaccatgcagccaaggagacagaagaacacaatgatgaacctggcatttgcccttgctgtggccacctcctattgtacaatttcagtaggtggtagaagcccgtgtcactgtgattaactatctttagggaggcctctctacacaaagccactattttgagaggcttacgattcagccataaaaatctgaggacagcatttaaagttgtggaagatacgacagtatcatatggtatcatacggtttttttggtctccccaccacccccatttttgagccatttcacttttgcaagttctttttgaacttttttaacttgagacatagcaaagcacaaaacatgataaaaatatttaaagcaccttactgattgtgtgacttcttgagtttgtaatgtcctctaaagatgagttccagagcttttgcacacctttttgtcattctctcagtgactcccttaagaaaaaagacttttataaaccttatgatagctatgtgatgttcaccttagagctcttacatctaaaaacctgtttgcaaactaaaccattgctatgcaaatgtaaagctccattattgttaagtaaaaataagtaagccaaataaggaagcaaatatagactccagggagttgcttgagaaatctggaagatctgctttgtaatattatatttcatcctagaaggtcccacacctttgataggtgcccctctccaactttgaaaatcccgtgaaaagtgtgacacttaaaatattactcacttcagctactgtattataaagttatcaaatattatctgtcttagaaaattcatagctttgctgctttttgatcattaaacttctcaaactttgtaattcttcattatggctaccaagaatgttaaagctattttaccccaatgtctttacatagtgtcattttctatgaaaagaatggaccaggctgggcatggtggcccacacctgtaatcccagcactttgggaggctgaggcaggtggatcgcgaggttgggagattgagaccaccctggccaacatggtgaaaccccatctgtactaaaaataccaaaaaaaatagccaggcgcgttggcatgtacctgtagtcccagctactcaggaggctgaggcaggagaattgcttgaacccgagaggcagaggttacagtgagccaagatcatgccactgcactccagcctgggtgacagagcgagactccatctcaaaaaaaagaatggaccagagtttagtaagaagaatgtcacctcttccactacagcatgtgtttctataatgtgaattagctcccacgtaattggtaaatagagaatgatgttactataagacagaatctcactgcgtcatagggcatttttcctggactgctagagttttgcaccactgaggaagcaacaggtgatagcagagtataccaacccactagcgagcagcagcctgcagaggggcacatttcagcacacaagagtttttcacttaaatcttttactctgggctccagctggtcacatgttctgtcttgggacatgttccctgtttgtttcaccccagacctgagccttttgcccttgctccattactcagctgcctgaactcttccttaaacttcctgccttcaagttattgactccttctttaaaaaatgatagagtaatttatttttttaatcaaaacatgtcattttaattgtgctaatagtttatgaaagtggtgattgtttttgtttggtgttctggttaccaagtttctaagagtttgagctgtctgttctaatcctatttttcccatacattctgttatttttagtgtgcaattttacagaaggtgaggtttctcactgatatatatcataacatagcagaaatgcctggagttgtacttatttcaggctaatagttgtttttatattatagaccaggtctgtggctaaaaaatatggcaccagcatagtgcctcttgctttctgaatgtgtagattgcatatttatttgattctgccacctctgatattttttgctatgacaaaaactgtttatatactcttcccactgcagacatggaggatgactgaagattttgttcactttccaatgaacaaagtgtatgtgttgggggaagttctttctgtttgtcattcttgggggcccggtatttctagttaagttactatacagatttctttgtggttcagcagtttgtcagctctctgcaggttctctcttgaagacatctgttgagtgcagtaatggcttcattgcagactcttgagttttcactaattttcttctgaaggattttaatgctgccttttgtagggaatatgaagaccctttcatctttttggagagtttcaagttctttggctcccatctcccctggtgaggttttccttggaggaccattctggccattattgactctctgggttctccatgtctataacctgccaaacaggctgtctgcctcacacagcaagtcccatgtctgtcccaggtggctgcagagccaggttgacaggaggctgaaaggaagtatcagtaccttcctctactgtgtccccattggtacttctcttcctctgtccctttcctcccctaactttctcggcatagtgtttccttatatagacctacattggctccaagctcacaatctcagaggaattacatgacatgcataaattatgaaacatttttttgcaaattaagttttaattaaaaccagcagcttagagcatccaactggaagcagtcacaatgttgaaaagtgacactggtagggtgggagttcaggagaaggtctgagtggctttgcatcctgtttggatatttccaaaatgaatgctgcagaaaagagcttccttccatatcagaccctccttaatctacactgccgccttcgatgaatccctttatgtcgttagaccctggactgccatggggaccaatataattttcaagcaggaaatacaaatgcatccttattgtagttttatctggactttgccaaatttccatctggttctaccagtctgcattctcacagagaactggcagaacctccagctcccccacattaccaaaactccaattcagatcacttttcagccggatgatcacccacaataaggctgaagaatggcaattttaattggaaccttatttttcagatacaatgcagagtgaaagcttgatgagaaatgacttctaattgtgagaattttcaggacattataatgagcaaaatgtggggggccttccctccactgatactccttagctatatgtaatatgagacttgttctggtctgcccattaataatgcacatttttcagcatctcaaagaatgtctgccatcaaatgagtaatttatgcaggcttgcctttcatctaggcagggctgtactactagaacaaaaactccagatcttttcattcaaaattaagtttgaaaatatgaccttcagtgaccagtccacattgctgctaactaatctggtgtggtggacggtgtggtgctctttgtagacctgtagcagagctagccacttggccattcaggaattttgaagtttaatattctctatgcctttaactcattcagaccctgggaaaggcttatccagataatctgtattttaaaattactggaatatcttttttttttttttttcttagacagagtcttactctgtcacccaggctggagtgcagtggtatgatctcagctcactgtaacctctgcttcccaggctcaacagattctaacgcctcagcctcctgagtagctgggactataggcacccagcaccacgcctggctaatttttgtattttttattagagatggggtttcaccatgttggccaggctggtgtcaaactcctgacctcaagtgatctgcccattttggcctcccaaagtgctgggattacaggggtgagccatcatgcccggcctggaatatctttaaaaatgaaggtgttggcttggcgggggtggtacaatgaacatcagaaagagagaaccttgctcagagtgtaacttgggacaacttttcttgagagtatttggactgaaatgtgcaataccctttaaccagtaattcaccttcttgaaaagttgagagggtgcctaacaatttgactacaaggatgtccattaccgtgtcattcatgttagtgacagcctagatctctaataataagaaatttaataagtaacttattacatattcaaataatttaaatatcataaagtgatttaacatgaagttaattgagatcagcggtggatattagcatcatagggagctttaaatgtctttttttggcctatcttttatatctaattttctacaaaaaaccggcattacttgtgtgatttttaaaaagaaacacttaggaaagtatatgtgttgccaagaagggtctttctgttcatcttttccttgcttttaaacataccattggaagaaaaaaaaaattgaagtcccatccataccccaaactagagattgagaaatcactattaaattatgtatgtcctggtaagataatacccaatttcataaaagcaagaaaatttggaatacatagataccattttacccataagtctttccaacaaaattggaaggacttactgatatgcagcaaaaattagaatgaggacatgactagttttaaagtagtaaagtcagctatgtttgtttgcttttattgaccctgtttttatcttatcttaccccctgcagggttatctctctacctgtgttcctactctttcctcctcctcctctttcaacatcaccataatagcaaggggttagctgaagccatgcaactgggagaggtcactcaattagggattatggagtgagcaacagggtgcccacatttaaagagctagagaaggaaggtggagtgaaggaagtagcagactggcactcatgggaaagctggggtagggaggggagaagattccaaggagaaggatattcagagagataccttttgtgtccctgacctatccaatattattataaaaaccagaatagcttccagactttggagaaatatgatgtcccatgtgtttgtaaggaaatttcatgcatagcattggaaatcttttgaggaaattactcctgagtatttttgaagctgagcaaagagttacagaaatattttgttgaatccctttatttgtacaaataaaatctagttgtgatctgccatggtgtgtacctaagagatacccagctgcaagtttctatgaaaatagtagtcctctgggggcagggcacagacaaacaaaaagacagcagtaacctctgcagacttaaatgtccctgtctgacagctttgaagagagcaatggttctcccagcatgcagctggagatgtgagaatgggcagactgcctcctcaagtgggtccctgacccctgacccccaagcagcctaactgggaggcacccccccagtaggggcagactgacatctcacacggccgggtactcctctgagacaaaacttccagaggaacgatcagacagcagcattcgcgattcacgaaagtccgctgttctgcagccaccactgctgttacccagtcaaacagggtctgaagtggacctctagcaaacttcaacagacatgcagctgagggtcctgtctggtagaaggaaaactaacaaacagaaaggacatccacaccaaaaacccatctgtacgtcaccatcatcaaagaccaaaagtagataaaaccacaaagatggggaaaaaacagagcagaaaaaaaggaaactctaaaaagcagagcgcctctcctcctccaaaagaacgcagttcctcaccagcaacggaacaaagctggacggagaatgactttgacgagttgagggaagaaggcttcagacgatcaaactactccgagctacaggaggaaattcaaaccaaaggcaaagaagttgaaaactttgaaaaaaatttagacgaatgtataagtagaataaccaatacagagaagtgcttaaaggagctgatggagctgaaagccaaggctcaagaactacgtgaagaatgcagaagcctcaggagccgatgtgatcaactggaagaaagggtatcagtgatggaagatgaaatgaatgaagcgagaagggaagtttagagaaaaaagaataaaaagaaacgaacaaagcctccaagaaatatgggactatgtgaaaaaaacaaatctacatctgattggtgtacctgaaagtgatgtggagaatggaaccaagttggaaaacactctgcaggatatgatccagtagaacttccccaatctagcaaggcagaccaacattcagattcaggaaatacagagaacgccacaaagatactccttgagaagagcaactccaagacacataattgtcagattcaccaaagtggaaatgaaggaaaaaatgttaagggcagccagagagaaaggtcggattacccacaaagggaagcccatcagactaacagcggatctctcggcagaaactccacaagccagaagagagtgggggccaatattcaacattcttaaagaaaagaattttcaacccagaatttcatatccagtcaaactaagcttcagaagtgaaggagaaataaaatcctttacagacaagcaaatgctgagagattttgtcaccaccaggcctgccctaaaagagctcctgaaggaagcactaaacatggaaaggaacaactggtaccagccactgcaaaatcatgccaaaatgtaaagaccatcgagactaggaagaaactgcatcaactaatgagcaaaataaccagctaacatcaaaatgacaggatcaaattcacacataacaatattaactttaaatgtaaatggactaaatgctccaattaaaagacacagactggcaaattggataaagagtcaagacccatcagtgtgctgtattcaggaaacccatctcacatgcagagacacacataggctcaaaataaaaggatggaggaagatctaccaagcaaatggaaaacaaaaaaagtcaggggttgcaatcctagtctctgacaaaacagactttaaaccaacaaagatcaaaagagacaaggccatacataatggtaaagggatcaattcaacaagaagagctaactatcctaaatatatatgcacccaatacaggagcacccagtttcataaagcaagtcttgagtgacctacaaagagacttagactcccacacaataataatgggagactttaacaccccactgttaatattagacagatcaacgagacagaaagttaacaaggaaactcaggaattgaactcagctctgcaccaagcggacctaatagatatctacagaactctccaccccaaatccacagaacatacattttttgcagcaccacaccacacctattccagaattgaccacatagttggaagtaaagctctcctcagcaaatgtaaaagaacagaaattataacaaactgtctctcagaccacagtgcaatcaaactagaactcaggattaagaaactcactcaaaatggctcaactacatggaaactgaacaacctgctcctgaatgactactgggtacagaacgaaatgaaggcagaaataaagatgttctttgaaaccaatgagaacaaagacacaacataccagaatctgtgggacacattcaaagcagtgtatagagggaaatttatagcactaaatgcccacaagagaaagcaggaaagatccaaaattgacaccctaacatcacaattaaaagaactggaaaagcaagagcaaacacattcaaaagctagcagaaggcaagaaataactaagatcagagcagaactgaaggaaatagagacacaaaaaacccttcaaaaaattaatgaatccaggagctggttttttgaaaggatcaacaatattgatagaccactagcaagactaataaagaagaaaagagagaagaatcaaatagacgcaataaaaaatgataaaggggatatcactaccgatcccacagaaatacaaactaccatcagagaatactacaaacacctctatgcaaataaactagaaaatctagaagaaatggataaattcctcaacacatacaccctcccaagactaaaccaggaagaagttgaatctctgaatagaccaataacaggctctgaaattgtggcaataatcaatagcttaccaaccaaaaagagtccaggaccagatggattcacagccgaattctaccagaggtacaaagaggaattggtaccattccttctgaaactattccagtcaatagaaaaagagtgaatcctccctaactcattttatgaggccagcatcatcctgacaccaaagccgggcagagacacaaccaaaaaagagaattttagaccaatatccttgatgaacattgatgcaaatatcctcaatcaaatactggcaaactgaatccagcagcacatcaaaaagcttatccaccatgatcaagtgggcttcatccctgggatgcaaggctggttcaatatatgcaaatcaataaatgtaatccagcatataaacagagccaaagacaaaaaccacatgattatctcaatagatgcagaaaaggcctttgacaaaattcaacaacccttcatgctaaaaactctcaataaattaggtattgatgagacatatctcaaaataataagacctatctatgacaaacccacagccaatatcatactgaatgggcaaaaactggaagcgttccctttgaaaactgacacaagacagagatgccctctctcaccactcctattcaacatagtgttggaagttctggccagggcaatcaggcgggagaaggaaataaagagtattcaattaggaaaagaggaagtcaaattgtccctgtttgcagacgacatgattgtatatctagaaaaccccattgtctcagcccaaaatctccttaagctgataagcaacttcagcaaagtctcaggatacaaaatcaatgtacaaaaatcacaagcattcttatacaccaatagcggacaaacagagaaccaaatcatgagtgaactctcattcacaattgcttcaaagagaataaaatacctaggaatccaacttacaagggatgtgaaggacctcttcaaggagaactacaaaccactgctcaatgaaataaaagaggatacaaacaaatggaagaaaattccatgctcatgggtaggaagaatcaatatcgtgagaatggccatgctgcccaaggtaatttatagattcaatgccatccccatcaagctaccaatgcctttattcacagaattggaaaaaactactttaaagttcatatggaaccaaaaaagagcccgcatcgccaagtcaatcctaagccaaaagaacaaagctggaggcatcacactacctgacttcaaactatactacaaggctacagtaaccaaaacagcatggtactgataccaaaacagagatatagatcaatggaacagaacagagccctcagaaataatgctgcatatctacaactgtctgatctttgacaaacctgagaaaaataagcaatggggaaaggaatccctacttaataaatggtgctgggaaaactggctagccatgtggagaaagctgaaactggatcccttccttacatcttatacaaaaattaattcaagatagattaaagacttaaacattagacctaaaaccataaaaaccctagaagaaaacctgggcattaccattcaggacataggcatgggcaaggacttcatgtctaagacaccaaaagcaatggcaacaaaagacaaaattgacaaatgggatctaactaaactgaagagcttctgcacagcgaaagaaactaccatcagagtgaacaggcgacctacaaaatgggagaaaattttcgcaaccttctcatctaacaaagggctaatatccagaatctacaatgaactcaaacaaatttacaagaaaaaaacaaacaaccccatcaaaaagtgggcgaaggacatgagcagacacttctcaaaagaaggcatttatgcagccaaaaaacacatgaaaaaatgctcaccatcactggccatcagagaaatgcaaatcaaaaccacaatgagataccatctcacaccagttagaatggcaatcatttaaaagtcaggaaacaacaggtgctggagaggatgtggagaaataggaacactttgacactgttggtgggactgtaaactagttcaaccattgtggaagtcagtgtggcgattcctcagggatctagaactagaaataccatttgacccagccatcccattactggttatatacccaaaggactataaatcatgctgctataaagacacatgcacacatatgtttattgtggcactattcccaatagcaaagacttggaaccaacccaaatgtccaacaatgatagactggattaagaaaatgtggcacatatacaccatggaatactatgcagccataaaaaatgatgagttcatgtcctttgtagggacatggatgaaattggaaatcatcattctcagtaaactatcacaagaacaaaaaaccaaacaccgcatattctcactcataggtgggaattgaacaatgagaacacatggacacaggaaggggaacatcacactctggggcctgttgtggggtggggggaggggggagggatagcattaggagatatacctaatgctaaatgatgagttaatgggtgcagcacatcagcatggcacatgtatacatatgtaactaacctgcacattgtgcacatgtaccctacaatttaaagtataataataatttttaaaaaataaaaaatagtaagaaaaattcagttcactccagatgccccaatagcttatactgagctgaaagccattagaagctaggtctcatggatgtggggtcagaagacaccatgggtgctgagctctgccatgtcactgccatgccctccctgctgttgacttcactcttaggcctatttgatgatctttccccagtagtttagttctaggtctttcctcacagattgtagtcaagaggaaagctagcaggggaaaagtgggagaggggtgtaaatgaaaagtctcgattagactagattaggtcacacgtctaccctgagccagttgctgtggccgagggaaagcgatgagttgagttgatggcttgggtctgggtaatgtccagatcatggggcttggcctcttacctagggcaagggacactgaaggaaaggggttagataatgaacataaagagataagtgttctggatttctcacctgtaaaattgtagtaataacactattagtagagataggagtcacactctgcctaatgtaccttgctcagaccctatcatttcttcactaacccactgtgatgcagcagtggctcagtgagaggggttctgataccaggtctgtagggtcacctgtggaccatgaggttggtgattactgtaacctctcatacgctatcggattggagccagccctaagtactctggaggttacgaaatcaaaggatgaaaacagcaaactgttatgggccagttgttttcgtaaagactcaatatgcattagctcgtttaatcctcacattaatctcatgaaataatgttattactactgttttacggatgagacctctagagttcagagacgctatattgttgtccaggttcttatggctactaagtggtagaggtagtatttgaaaggtggtctaccaagctccaaggccctccttctttcattgcttcttcctttcttccttctttcttctccttcctttccttctgctctcatttctctctttctctccctctctcttcctttcttccttccttcctttatctctttcttctctctttctttccttccttccttctttcttttttttttttttttttgagacggagtctcgctctgtcgcccaggtcggactgcggactgcagtggcgcaatctcggctcactgcaagctccgcttcccgggttcacgccattctcctgcctcagcctcccgagtagctgggactacaggcgcccgccaccgcgcccggctaattttttgtatttttagtagagacggggtttcaccttgttagccaggatggtctcgatctcctgacctcatgatccacccgcctcggcctcccaaagtgctgggattacaggcgtgagccaccgcgcccggccccttccttctttctttctttctttctttcattctttcttcccctccctcccttcctttgttcctctcttcctcccttccttccctttcctccttcctctctccccccttccttttttctttttctctccctccctccctgatctttttttctttctttcccatttccctctttccctccttccttcttttcaacaaatatacactgaattcttaccaagggccaggcataggtatagtccctaggaatacaacagtgaataagatagatacagtccctcggtagatcttatatggaggtcatcaaaaaacctaaacaagtaaagaggaagattacacagtgcaacaaatgctaagacaggaataaacaagatgatattatagaaagacacttggggtagagataataacacctgccagaagaggtgccatcagagctgagatctgacgcatgggtagggaatcagtgaggcagggaagtggggtagtcagagaattgacgtgaagttgtcggggcagagcattaaccaaccagaggaaagagccccacaaaggctttaaggcaagtgaaatttgaagcacaggctgccaagtaccaggcttatactttcagatcattctgggtgccatgtaaaggaaggattggattggagggctggagtgaacctggagagaccagatgagcagcagtggtggcatggtgtggggtggcagaagtggaaggatgtgagacaacctgcactgccaaatcttagctcatcagagaccccttggcataggttttagagtttgagccatttaacagaactttctttgctctatagtagagtgcggatctttatccacattgcttaatgaagaagaatggaagattatacatgcaagcatccacagggaaaaaaatgaacacacagaacctcagcagcaagcagggattgatcattcattcatgaggcccgaggcaaagggccagttttacaaatggaataaagatatgtaggccaggctttttttgttttacacagttggcaggaaaatactttgtttcttatttggtctttacatatttcacagtgaaatgtgttgttttgatcaatagatctttaattggagttttatgtttgaaaaagggtccactcaagtttggaacttcgttgagctagagcactagatgtcccttcaatcacccccatgggtctgtgtgaaactctgaggtagaaatgaagtgaattaggagaattaaaacaaaaacatgtccctctgctcggtgggtatttttctttttgaaatacctttatcagggcctcagatctcttcctcacatctcctttgtgcctcacctattgttcctcacaggttgcctgcgctggtcccatctcatcacatgggctctccctggtgggatgtccccgattgagtcctgggctctcgctgtcctctgcctacactcaccccttcggtaacctcatctacgtgcagacagtaaccaagctcaggcctcctcccgggacatgagcttcatatttccagctgcctaccctacacctctgcctgcaatcctaagagacatcttgaacttttcttaattttggacaaaactgagctcttagtgtttttcctcaactgtgcttctcccatactcatcttctcagtatgcctctcccatagtcatcttctcagtaaatggcagctctgtttttgcatttatcaaggaccaaccttggccgcatcttttatgtctcttctatcatgatccaggctatcatctcgattctcaactctacctggggtcagactattgcctgctgcctccacaccaccagtgtgctgatcctgttctccctcagttcttttttttttttttttttttttttttttttttttttttttttttttttttgagacagcatctcactctgtcacccaggctggagtgcagtggtgtgatgttagctcactgcaacctccgcctcccaggtacaagcgattctcctgcttcagcctcccaagtagctgggattacaggcacactccaccatgcccagctaattttttttgtatttttagtagagacagggtttcgccatgttggccatgctggtctcgaactcctgacctcgggtgatctgctcacctcggcctcccaaagtgctgggagcacaggcatgagccaccatgcccggcctctgtcagttcttatctagaccattcaatagtctggtcaccggccttccttctcaaattctgtctttattgctctctggctttgtgaccttgtagtttcaacatctgcagaattagagtaataatagagcttacctaataagattactgtgagttttcagtaagttaatataggtaaagcacttcaaatggtggatagcatgtcacagctgtcataatcacctgtcattactgctgtcttcaatatcctagtgcatggctgttagccttaagataacctcataggccagaatgactgctagagctctagtcatcacattcaccttcctggcagtaggatggagggagtccttttaaagacactatctggaaaagccacatttatgcatacctcattggccacgactgaagccatttaactgcttatatctttaatagagtcatttagctaagcttggctaaaattagggtttctggtactgaaaaagaaaagcagcatggcaataactttgctaccaattgcaggtatgtggtactaggaaggcctgcgaaaagagcatatgacaagagagggtaaacaagtcttctttgagacacagacaactgaccagagaaataggtgtttgccaggcaagtggagaggggtcttaggaagagctccaggatgagaggacagaacaaatgtctgtgaccagagagagcacggacagtcttcatgttgcaccatccacctgatacaccacatattgaaaaccatggtggctgggttctctgtcctccatccagactcttccataaggagtcgtgccaggatttctcatccctgctttctcttctgggtgatgcccagatggaatggcccatgaggtccccaagtcctttgggggtgtaggtttgtgctgctattgtgtggtcgtgtgagaagtagcactggttggagcagacgtgggtccacacagagccttgtccttgactttcaacaggaacatttcctgactggggtgaccttggtgagatacttaaccattctaaatattgtctgtttcctcacctgtaaactgagaagatactaatatctaatccagagattcactacaaaaagcaaaagagctaaaactgatcaagcatttagccaggtccctggtttaaggaaaaagtccaatcaacagtgactatttctgttattgctgtcacctttatcttcatcatttcctctccttcatccccttctgaatacacattctccatgtttgaatgtgaagtgtcacctgaaatgtatcctgcacccagctttttctcaggagtgtgtaaacccacagcacaccacaacttttttctttaaccttcttttggaaaaatgacttgaggatgtattcagttatacagagaatcctacagtctgcggtgtgggccaggaaggaacccaatgctgcctgtccagacccctcatggagtaaatgaggaaatagacccagcaaggcagagcctggttggcaatgcctgacaaggtggctttgaagaagaaaacatctccccggtgtgttgaggaagagatgtgacctcatctggagcctcatgatgatgagaagtgcccaggctggttttatgcatatccaggggtcactgagacatcactcatagacagacatctataccaggcatgtgggaatgtgagtttcaaatctattcctctagcagatatatttttctcttgaaggccatcagcttgggtgattaacatggtggtggggggtgttgattcaaggattcaaggcagttaccccgattatctttccctggcatcaactctgggcatatcctagtaataaggtagcttatttaacaagggaagtaccagtcacaggttagaggacttcacacgtacatatggggaagatgtcttctctgccctcatggagtttgtgacctagcaggatagaaaggcattacttgaaaaaattacatagtcactagagttgtgctcagaactatagaaaaaaagcgcagggaaatgttttgccatttcttatttataacaaattctgctatttggttataatattctttttttttttttttttttgagacaggatctcactctgtcgcccaggctggagtgcagtggcattatcagggctcacagcagcctcaacctcctgggctcaggtgattctccccacctcagcctcccgagtagctgggactacagccatgtgccaccattcccagctaattttttttgtattttttgtagagatggagtttcactatgttgcccaggctggtctcaaactcctggactcaagcaatctgcccaacttgacttcccaaagttctgggatcacaggtgtgagccactgcacctggctggtcataaaattctttccagtgaaactcaggcatgacttcagaatccttctcaacatagcccttcatccagccgttgctaattagttagagctgggtctcaaggtaaaacctagcggccatccaagacctggcctttccccagccctctctctatcattccactttacaggcaagcacactggccagaggctggaaggcatatgcctcaagacttgagtcaaaggccaaagcagagcaggtatctggctggtctggcccctagggcagggccctgcacgcaagtcatgaatgctgggtgacaatgtgttggggagccagctcccagcagcagcatctgtggccacagaggatctgatctaaatatgtgctattctaccctgagactccttcagagaggtccagcctggtgagggcatcacaagctgtaatttacattatttaaaagctccagtaggaaagttgctctttgttctcgtaagttatttcttgaggaaaatatatgttttgtggggaggatgagggcagtcttaaactgaggacatcaccacaaaggcctggtctgtcattttccttcccaggatttcttcccatatgcttaaatggatgagtcaaaaagaggtgtttcctgctcaacaaagataaaatagagagagagagaaaggacagctctcctgtcagagaggcctgcaaagtccagcagtttgtgcagggcttcactttggtatttattttgcagtccatcaaacatttgtcatactcatggccccttgctttcacaggacatagctgcgattcgacacaaacactttcctaagaaaatatacatttttcattccacaatgttcatgtatccaaggtttgtttcctgttgtgtgaaaagatgtttaatatttgagaagcttttttaaaagtgattcctcattttaaactcagtttctcatctcgtggtctatttttttctgaactcttgaaaagcactggaggagcttatgagcttcctttctgaatagttccagccataagtaggaggaacaaatcaggaaaacatcctcatatttccgtcttcttaaattgggagacccgtataagataaaagtgttggaaattgagtgttggagaagttggagtctgcttttcatagacattctcaataccattttggagacatctctgagatccaaaacatcttgtttgttcggttctactctttgtgggctccatccacaggggcaggggtttagggcaagtttaagagagccctggtcttcttttatcagaagagaaagcattcttcccagagtaaaaagaatgggaaagtctgatgattcaagtggagaccttaagatgtctcatttagttgctttgcattttctagcacttctgatgtcataagctctagagagacagagagaaagtctactgtcacaattcccaagtgtttggggtctttatttatgtgtgaattgagttgaattagtatgttctaaagtcaggcagcacagtcctatgattgtttatctatgggacgttgtataattacttaacctttaagttccattttagtttttctctgtaaaacagggatacctagcattgggttgttgtgatttaatgggataatgcaaagacgtaatacagtgcctggtgacaagttcacactcgataaatgttagtccctatgttgagaagtaaatcttcgtaatgatgtaattcttagattgggtatttaatacatggatcatgttaattccattccagattagaaagatgctttcaaaaacactgcatgctataatggcagtcataatactgtggaattaaaccgtagcctaatactctcaacacagaaatatagacaaatatgtctcgtaaatgttgatctttttccacatacctattaatttcagttcctcgcctgtgccattgggaaagctgttatgtcttattttatggattgactgactgccttttccttgttcttagaacatcagctttactttaaatgcacaaatcctggtgcatacttccttaaccatcaataaagggaacagttaatgtgctacaaagcaagaaaaattgactttaaaaacaagcatttttctaacagtcttacctttatatacagcagggtttctcaactttggcactatggatatatgggctgggcagtttgtttttgtgggggactgtcctgtgcattgtaagatgtaccacagtgtcccttggcctctaccctctagaggccaacagctctcgctcccttccctttcaccccctagttttgacaaccccaaatgtctccagatggccctcatccagttgaaaactgctggtcaaaggaagaaggaactgggtcatggaattgtgcccttcggatcactgggcagaagagcctcggttccagctttataggagtttaccaactgctttggatgtggtgattcccaaaacacatgctggaaagctcgtagattatctgttgataccacaaattcagaaagcaggtcaaataatcagcactgtagcttcattttgaaaaataacttgctttacctctttttcacttgtctccccattttggtttctccatttgcaaatggcaagaaaatgaagctttaccattaattacttatataatgatcaacttttttcttttttgttttgttttgttttcccccttcagctccctcaggcacaaaaggtaaattctcttctgtcacattccagtcacccccagaactcacgagtcatgcatgcctccatggtgttgtacatttgacactgttcatgaccagtgaaatggtttttttccacagcttcagaaacctgaagttgggcaggaacagagaggccagcagactcagttgtccactgctcctttgctgagttagtccctccaaaggaccctatagtggccagtgattgggaggtgaatctgtgcccaactgtttctctaagaattatcaaataataggtcaagaataagtttgacacattccttccaatgtagcattccaggccttctctgaggtaatttttagggagacaaataatgtgaataattagtaaggcgtggtaaccaagtttaaatttggggctcctaagccaaatcgctgaaaacttattggattttattaattgtaaaaatcagcagctcctttgctagcttcatcatcccagagaccattagagcagatttcttgccaatggccagaccctttcactggtcctcattgtctgagatgatctagttccaccatctagaatgttctgtgtccagaaagactccatgtggttgcagtgatggctttgctgtgtcaccctcatagcatgtcgttgtatcctaaggacatttatggcagaaaatatgtcactcagtgcctgctgcattgttcttgtgtgtttcacaaattctggaagacacagcaatttctgggggccagatgttgtgtttcaagagtcaaggtagggcacccccctgaaatttaaacagcatctcctaagctctccagtttagagcagaggtgatttggttccttctcattgagagagagcacaactgctctactaaagacagtctgttcagaccatatggacaaccagaggcctagaaatcattacacaattactcagatatatttgaggtatttaaacaaggcaaggcatgctagtgtgtgacttggcttgtggtaatgtttgattacacttcaatgccatcacaaaaggacggaatacttcattaaaagttaaagtattcaaggctcacaacagcttccagggtaaataaatggtcagaattccagattgtttggaaggctcaatgtctttgataggacatgctttcttaattacctacatttgaatttttttgatagagagacttcacaaattctctgcctaaaaatggaccagcttccacttattgacatttattcatcaaatttccactgatccatatacaaagtattcctgttacagaaaataattcatgaattggaggtgccatcagccgtagaaatttgttttattttattttttgagacagagtctcactatgtcacccaggctggagtgcaacaatctcggctcacgcaatctccacctcccgggttcaatcgattctcctgcctcagcctcctgaatagctgggacagacatgcgccaccgcacctggcttatttttgtatttttagtagagacagggttttgccatgttggccaggctgatcttgaattcctgaccttaggtgatctgcctgcctcggcctcaaaatgctgggatacagtgagccactgcgcccagccagccatagaattgtaaaacaaagttcaaaacaaagcaacacagaatacagaagaacaaatgttgctgggctatataatacttcagtagcacttacttcattgcattcacttcttctgtcatcatatattgactcacatcacatgccctgcaaagtggagcatattattgtggtcatataaaagtcaaggaaggtacctcagctggcttcctaatttttttccctgtctccgaatgatgtcagacatcccaagggacttgttctatagccctatgtgaaaaggaatagctttgccttctgttcctatcatggctagaaattgtcttttttctgttaaaatagagaaaggcacttaccttacaaaatattaagagatctatgcgacatggtttcagaacactttgggggtagtttgcgggaaattcagctctttgaagaaggagtttgaacgtaaacctcaggtatctaggctggagggtaagaggagttgagggagaggtgcaccatagattgaaggcatcctcccaaaggctgcaagtctccacctggtaatgtattagcatccctgcccccaactccccttcccatcccttccccagtattacctcagtgacacttgcaagaggcctttgccagaagaatgaggttcttgcaagtgtcagctttccttagatttactgtcttgctgcttgaccagcaaaggaatgtggtggttccattttggccttcatccatttgttaccatgggtaagttacttaacctctctaagcctacatgtttttatttacttaaggagaatgataaactaactttccacttttgttttgaaagttacttctcttacctgttcctcgcacagagcctggcatatggtagaccctcaaaatatagagttcttattacgacttggcttgacttgacccctggtgcttcatagcacatcaagagagcagtcatatctgaggggtggtctgggacctctgcccaatgttttgtgattctgactcaagcctaatgaataactgggagagggcaaaagagcccagcaggtatgggtgctccccccatttcattagaaactctgttgttgggccaggcatggtggctcacgcctgtaatcctagtgctttgggaggccgaggcaggtggattacgaggtcaggagatcgagaccatcctggccaacatggtgaaaccacgtctcttctaaaaatacaaaaattagccgggcgtggtggcgcacacctatagtcccagctaatccagaggctggggcaggagaattgcttgaacctgggaggtggaggttgcagtgagccgagatcacactactgcactccagcctggtgacagggtgagactccacctcaaaaaacacacacacacacacaaaacctgtgtgcttaaactgactgcaccttcttcatgtagtcagaaagaaatggagattggtcttgaaaccccaacaaagcaaaaatttgtcgggagaattgttttgagaggtttcttcctaatgcctttgacattacccatagatttcactcatctgtggccatgattctaatgagctctttccaaacccctgagtttgttgttccaggggtgaaagagaggcacccccagccactacagctttggcctacttttcacatgaggtcatgagcgcatacgttgtaccatatggtgtctgcatttgcgctgtgtttttgttggactctgcctttgtatcatctgcaactattttctctataaatattttaaatagttacgtctctgtaaacatacttatttaaatctcttggctgatctgcaactaaaaatgtcccatttgggtgtccctcttatgtgtagcagccattaatgactgttgtctgtaagttatggttttcatgattctaatattttgagggtcttccaaaacttctagtcctttatgacaatgttttagaacaacagtttgaaaaaaaatattattttttctgtggttcttaagcatctctaagataattcctagactctataaatttcaagccttgatataaaattggagtggcactaactggtgatgaacctgataaatattaaatattcttagcaaatatggaggtagtgtcctgaggttttggctaaaaaatatgtagcaatacagatgcagcactttcaaggcgtcacaaattcattcttctgggtggaaattggaccagtttcttgggtggattgattgtccctgaattcaacaatgaagagaggtctatgtgtaagaaaggtctgctttttaaaaattcttctttacttctacagaagtgtccgagagatctgattttatgataataacatagcagaattacccaaagccatttacaaatatatgttcaatagtaatactattgaacaaaatagtccctttttctagctgcatttttcttcacgtagattctgtctataggagctaaacatcagttattcactgcaggattaatttaatcaatgtaggtttaatcaacgtagagtgggcccgaatgtttaaagtcaaaaatactcttcagggagttccaaacgtggctatttatgtggatgaacgtgtccagactctggtaccctttcccttcattttctgctgcatccacacaactttggaatttgcaaaagaacatttcttaaaggtttcctaggtgctctatgtctttcctgacaccgtattagttaatatcaacctgagaattctgagtaggcataagcatttttcacaaaaccatagttaaagcaaaccacatctctaatcctgtttggaacagcaattgatgcattcagggctgcgcagtatggcaaaatgatccctgtttaatagcccgactgcgtgttttgtttcctgttaggaacagcttaacttgcctccttgaacaaacacagcagggttcaagatctgttgttctatgcctgctgtgattttctgtgctgcttaacttgtatgaggactcaggagtgcataaattagcttcttaaatggaggtcgatttttggtctctttttcagaatggaactgttttattaatttctccccctgagtgcaaacggcatcctgaatctatttgcattttctttgtttccttgtttatattatattttggaggaataaatggaagccttcgtttttctagagtctttcgttctttctttctttctttctttctttctttctttctttctttctttctttctttctttccttccttccttctttcctctctctctctctctctctttctctctctctctttctcattccttaggtacaaatttgtacaagtagaatttggcctagctcttatctcagggtaatcagatttcagcaattgcgaggcatcatttatcattctttgcctcatttaacttctatacttcgaacagttgaattaactgtcaatgaaaattgaaaattgaaagtttgcaaagctgctgtttttgtagaactgcaggtctagtgatttcagtgtttcattacagttatataaccatctaaactgatgcaaatgaagtgcaaaactgagaactgataactatttacatttggttctggtttatgactcatttgcttttacctgtactttgctttgcatgtaaactattacatcttgttttgaaaaccctatttttctccttatcatttactattttatagtaacatgtaaggtactttttatatgcattcccaagccgggggtgttaagattgatatactcacagtctgaaaaatgatagcagcacagtggactacagtttaaattattggatctattttatgaataaggctatggtgctagaaaccagagagcaagtctagtcacttcagcttttcctgtagccagcgtgagaggctctgtggaaatctgagtgatggcatattgcccaaccctaacaatggttatataactaagtattttgttctctgccatagttctgtatgagtgtgtctgtggcagcccagacaggctgctctgctgctgaggaaggaggtgaactttgcaagtgtacccatgtgagtcttggctgaccccttttccatggccctatccaactttgcacttgaggcctgaaataaatgaatgcaagaccctcagattcaaagtgcatggcttcctaatggcaggatagccagcaggacagcatataggcactccagccgaagctacgtgtgggttcctgggggtcatggagctctgtttggaagcaagatgctatttgcatttcttttttattttctttctttctttctttctttctttctttctttctttctttctttctttctttctttcctttctttctttctttctttctttctttctttctttctttcttttctttctttctttctttctttctttctttttaaatttgagacagagattagctcatgttgcctgtgctggagtgcaattgcgcgatctcggctcactgcaacctctgcctcctgggttcaagcgattctcttgcctcagcctcccgagtagctgggattacaggcacctgccaccacacccagctaatttttgtatttttagtagagacagagtttcaccatgttggccaggctggtcttgaactcctaacctcaggtgatccacctgccccagcctcccaaagtgctgggattccaggtatgagccaccatgcccagcctgctatttgcatttcttattgaaaggaaataatctcttcatatcaaacaacctcatagtgtgtgtctacttgtgtgtaaggggaaaaatcagggtttactccattttcagatttatttgaacatttgacgtgttcatgtactatttttatgctttatatactatttttcctgattattcaggaaaaaaacaaagtaaaaacaatattacattttattattaacttttttaaaagtttttttttagcttttacacttttatgcatgaaaattgataaaagccttcaataaaacataccactacataccagtaactttcacactttcagcctttgactcaacaaccctcttttgcagaatctagcctaaattggtcagtgacttgcaattttatttataatgaggaaaagaagagccaaaatacctgaaatgagaaagtggttgaaaaagtcactgaacttccaaaaaacagaatattaagaagccataaacaaaaccatagttcaaaaggatatttaataatgtaagaaaatacatcattttaaaattagagtgtaacattttatgtacattatgctcctgttgtgtgtgtgtgcgtgtgtgtacaaacagatgtacaaaactgtattggaaagaaatgcatagacatatttaatagtggctatttcctagtggtaggagaacaaatatgtattttgttttcttaatacatttttgcatatttcaaattctgtattatgagcgtacattatttttataagtaaatgattatatttgtagtaatgaactaattgttttactcataaatacactaaatgaaatagactaccaagagttaacctaacaatagtctgctaagcccaactctcccaagaaataaacaaatgaaaaagtgggaaacccaaactctgttgtaaaaatacacatgcataacatgcattgattcttggtacagacagctataatcagaaggacaaaggtttataaacagtgggttgtcttacgtgggacaagtctgaaagtaccttagcttatcagtaatccttattttctaccaaaggcgatctaccaatctttaatcaaagactcagtccatgtcagatgcttagagcgacattgatctgagcatgggaaatccacaaaaaatggtaggtgtgtggttacaccgtggaggtcacccacccaacatgagcctcagtcagtaggtgttccctgtcctcctcacacctctggttgggggaaggactaccttggcttaaaaatggaaaaaatgaagtggggtgagaatgacatctgcccaacttgctatttggagagtgttgtaccaagttgtgtaacctctggtattgcattcatcattgcagaagggacgcattccactcctacaggtgaggcaaaggagcccatcgctcttaagactaacttgagtcagctggatatggagtggaggccccacctgccagttctcactggtaaccttggacccaggatatggacccaggatacatcgtcctgagcctcggtttttcttgttttaatggggtacagacacgtcccttatgggattttcctgagagtacaggagcagcacctgctcagggcccatccacgccacatgctcaatgaggggtagtgttggccatggcagggacagtaatattattaataatgctagcagcattataccttgtttaatacagacacatttaataaagttaaagcagaaatggtttcttttaaaaataggcaaaaagaacttggtgtttattaagttgaaaaccaaaaattgattttacagttccttacatctcagtgctttctagtttcagacttaattcttagtgtcttagaaatccagtgtcttctttcaaaaattctcatttatttaaatatgtgactgttttctatttatttaaatcaagcacagttataaaatatgactcttttaaggtgctaaaacaatacaaactgtactcacaacattgctgcaatgaaactgccttttcttttgaatgttaaggaaacatctgagtaaaaacaatgaaatttttaaagttgttttcatctcagttgttcttacatcctcgaagatataaaaacacccttcttccttctacacagaagggaaggtagaggatcgaggaaagttatttcacaaagccctctgaattgggataccatgatattaatgtcagtatcaccagtatttagcctgggtggtcttgaaggggacatcacaggacactcaatgttctgtttccttgcttatagatacaattctgtaggtcatttttattgacacaaagttgatcttgaactcaatgagttgggttttcattttggggtctcttccgtatttcttggtagatttagaacacctgtatccatcacttgacacactggatgtttcctgaaatcaacaatgtatgaatctacactttatggccaaggccttggaagaggccagctaaagaacaagttaaaggacaactgccagtatcttaaagagataaagaattaagcaacccaggaaataaacatattttattttctaattgcattagagaaagatgacacaagaacaccattttaacactgaggtaaatcagattcaatacaatttagttactaatttgaaaaccaaatctatgtaaaatataataaatgaagtctatatcaaatcaatgtgaaatcatcatcagtgattttaatctgactttattagttctcataggaagggatttcctgtgtggaagatatactagattaatatgatgagttactcaagagaaaacacacataccatatgtgcatatgcatagcttttctttactttttggcaaaatttttttgatacaatacaaatcgaattttctgacaaaatttgtctacctgtattgtttgtgcacattaaaactaaaaaattaattattttaaagaagcaactgccttttggtttttcttagtaaattgagccacatatttaatggtctggtcatgttcagctgcctgatgctttttccagtcatgttactcactggtcacatccccaattaatggatatatatccattacaaacccaaatgtagcccacttccatgagaactgaaggaatggctctggatgcgctgccagacatctcatgccaaaggattcaactgaaatgaccctctggggtaaactggagcagttgtgcaatcctgtacatcagtgctaccaagaagttcaaaaacaaaatgttagatgtttatcccttcaaattaactagaaggattttggaaaacccaaccaagtttcatgaagtagaaaatgtcaagcaaagactaatgtcgtggtatggattttctttttccagaaatgactcacgaaattgaaccacttgctgaatcatgagccctgtgtgcttggatgggacccatccatatttgcccaggcctggaacacattagatgatttacaggctgggtacttctgaagcatctgtcccttcttcccagactcccttcctctataacaacttccttcccagtgtgcatccttcctaatctcctttaatatttatgatcataattaattataattaaccactccccacccccaccaactgctttcatattatttaactgttaagaccaagatatttgatcatgggataaaggaaacatgtcttcctattttatttatgcaattcaggagatagatgaagttcaaatctttggatttcaaagaagcataagaatttctctggcctagtctggaatggtctttatgagattaattgcacttgtcagatgtcccaggcactgtgctaggcactttatgtctataattcatttaatgcctccaagaactctaaggacttttcctatttgaaggatgatttgcttgattgcaacctcctttgctacacttcaaactcctgagggccaaacatggcatttgtctttgcaccccaaaacaagagtctgagggtggagtggttactacacaggctctggcatcaggtagaccaagactcagatctctactctgctgttttctgtacctgaagcaaggcactttgcctttttaactccttcacttgtgaaatgtgcgtaggcacttgcaacgtctttgtcagggttcaatttaaggctacgtagatgcaaaacattcacagcaacgtttggtagcaagtacaaatgatatttggcaatggatatggaaaggtaggcgtgtggatggatagacagaaggaaggatggaaagatagatcaataaaaatgactcagcaagtttgagtaaccttctccagcatgttaatgcaggtctgtttgcttccgtttgcttgttactttttgtcttctccgtgctgctaagcacattgcagtgttcaactaagctgtgttttttttaagtccttttcttttatcactgtgacatcagctggacgttgtgcaccagcttctcagcacttccttacagtctcagtccaaccacattgatacaggcaaaatacacaaagatattcagtgaaggagccgtgagcaaggagagactgtataatgtgaaagagggagcactagccccagagtcttgcctgaattctggtactaattttctctgccttctttactccctgggcctcatttgtgaaataaattaaacgatagtgttggaataaattcatttaaggaccatttgctgggcatgtcttgtgtaccaggctctgtgctaaatgccgtggatgaaaagaggaatctttcccagcttctgcccttggagttcacaggctttacacaattcccagcatttcttccagccacagtgttcagtgactttgcttcattaacagtttgcacaaattttggtcctagatggtatctttggttgtagaataaagatgattatctttgtagtgaagtttgagaacatctggttctcatttccacttagttagggaaggttttatggaggaagcagcatttcagggggtctttaaacaaggagaaggttttgtcccagggccccaaagctctgacagttgcctgtgttttcagggcatctacttggaggtgtctaaaccacgtttgtgaaaatatgaacatttggccaccatggggggtcaattatgtgtcatggctcatcataaatattgaccaaaatccaatgcctcatgataattttcattgtcattagtcctgggcattcttgaaataagcaggttatacccaaataaaccaacaaagcggtttccaagacagctttcagatatgttaatcagtgatattctcatgaccatggctttatttatatatgttcatggtcaaaggcagtatcctccctctatctagaagtttactcataaaacatattcctttcttaatgacatatcctagaatcactggaacaaaaggacagaatatcaaaatgttcccgaataataacaattttattagaagaggactgtttttagattctcatatagatgttccaagattgtccagcattatattcacaaagttgtcttcagtttgttaagaagagaaagagaacaaacaaattcaacaatttagctcatacaagatgcagttaaagttcaaagagggaaatctgtttacttttgtatttaaacaagttaaaatgcagtgaaatctcatggaagaatatggaatctccagatctcaaatgcaagtaataatgattcagtaagaagagggaaaatgttttggctaaaagcaaaatatcttttttgtagcattctcaagatttagtgattacactttaccaagacaatcaagtgaaaagcaagaggacatgttacttgaaaggtttacttatttcttattcttgtttcttattctaattgtaaagtctctcaattaaaactgctcacaatcagcaaaccttaagattatcactaaaagtagtggaaatctaaagaatataagagcagagcaaaatccacagccagagtcagatgatgttaacattagccaagtaggcagaatcaatactgtggtccctttccaggcatgagatgcaataggatctccctgccccacgtttcagtggattttcacctgtgttcttcctccaaaaggtgtctgtatctctactgggggtgtgtctccagagaaaacatcctcctgaacatgcctagcacagtcttactagattctttccctgacatgtctgcccagtgttgaggataagagatgttgtgatgatggaagtgggtgggagatttgggggtggtgcaagtagttggccattgaaaggttaggtacagaggacttttttggctggtggaggagggaagggtgcagagactttgtttggggaaggtatctaaattgccacatagtctgcttacatccccttttccagatgtacgtctccctgctgttctccctggtgccctcacaaactaattgtacagagagctgttctgatggctttctgttgtcttcctctctccttgccatggagtgtgcaaactgcaggacatgggtgacatttcttcccagcctcaccccattaaccctattatgtgctacccagagaatggcccttaagaattcccaagtcattgataaacttaagctcatggggagaggtgaaagtgccaaggagttggtgtcccttttgttcaagctgcatttgagaaagtgggtgtgaaagaacctctcctttgctaagctcccctgtcacattctcagattctgcatatcttttcttcttcttcttcatctttttttttttttttttttttttttttgagatggagttttgctctgtcacccaggctggagtgcagtggcaagatctcaggtcactgcaacctctgcctcccaggttcaagcaattctctgcctcccgggttcaagcaattctctgcctcctgggttcaagcaattctctgcctcagcctcctgagtagctgggattacaggcacccatcaccacgcctggctaattttttgtatttttagtagagacgggatttcaccatcttggccaggctgatcttgaactcctgacctcatgatccacctgccttggcctcccaaagtgctgggattacaggcgtgagccaccacgcccagcccagattctggttatcttaaagaatcaatggttctcttttcataatgtctcgtctgatttatagatgtgcacagctgtgtttttccacctcttagtactactccttttctgtcaaggcaaatgttattatcagacctaattgttgataaccgccggtctttgcttcagttgggtaggtaactaaacgacatcagctggcatttaaatacttttttttttttttttgagatggagtcttactctgcagtccaggctgttgcacaatggcacgatatcggtttgctgcaaccgtcacctcctgggctcaagcaattctcctgcctcagcctcccaagtagagtagctgggattacaggagtgcccccaccacgcccagctaatttttgtatttttagtgcagacgggttttcgccacgttggccaagctggtctcaaactcccaacctcaggtgatccgccctcccaaagtgctgggatttggccacttggcctcccaaagtgctgggattacaggcgtgagtcaccgcacctggcccctaaatatatttttgtttgtaaggcccatactctggaaatggctttttgtcgtccaggacctcgtgcctgcaatttaccctaatggccactagatggtggcagtgtcttttcatagagtgcaggttgaagttcctcgcaggtgttgaaaggaagctagcagaaacaccgctgcgtattcacaagttatacacacacatataaaatatttatgtattatagtattatacatttatattatttactaacatagtcaatatgttgatcaatgttaataataaagcaacacaaatgtaagaggagcaaaatatagaagaaatatgatatttgatgagagttagtggattagcttttgttcttgacttggagccagtcctgtatctgagctgagtccaccatttgtgcacaaccttccctttaagcccaagcctctagggctgagcagatctggcaggcggctccgctgaaaaccacctggcagtcctcaaatgggctgccaagagtgctgtccttggcttgctcagatgccttccaggtccagcttgcctcctttctctgcagcttggcattcacccccaggggcttccagctgcaggagaaacagaggcttctgccaccagtcctggcaagcttcctctgaatagagttatgaagaaggcaacccaaacagatgtccttcaaaggtggaggctgcccagacagcaagcacatagccacagctgctccccaccatgggcaaccactggggaagcagccaaacttctactcattgtgaaggcttgacataaaattctagtgacaatagtcttttataccatcataaagagtagtcattaccatcagtatttgggtactttgcaggtacctaaatttcttctcttgtgggaaagatatgcaaccatccatcttgggaatgttggtacccttttgcctttggcctttttggcctcagaaatttctcctttgtgtggattgtacatggcacttgggaccacctcagtgggtatctagagctgcctaggtcatttatggcccagattggtatgtctaagagttacaaatccatttcatgctcattgaagctaaaagagaaaacttattggctcaggcaaccccataatggaaaaggggcattggtggaattgatcttgggaatgaaggcattcagggacaggtaccctcccgccctttccctcttttttttcctccctccctctttatctctctcttctctgtcacacacacacacacacacacacacacacacacacacacacacacgtctctcctcctctctgttgagtttattttattcagtctcatcgcctctctgtggcaaggggacacggctgtcaagctgacattcttatagccattcacaaaggagaataggtagtctttcccatttgctcctggttagaaaaagaaaaacatctcaggtagcctagcctgaactacatgcctagttaataaacttaccagtgcagctcgcgcagagtgtgtgtgtgcacacttctgtgtgtgaagtgctctggttaacacagcctgggttggctgtccatccccacactcaggatgggagagcttgactgctaagaaaccttgtggttggacggggtgaagaggactttcctaaaggaagtgggtgatacctgcagaagaaggaaaagaaaggggccaggcagtttacaagatgtctacccctgcattgttccatttaccaatatccttaagtataaagcaatggaatgaaatcactctgcggcagactactttctcctgcgtttgttagactggctttcaggaagcattctgaatctgtcatataaaccctgacagatattgataaacaccaggcattttcactttagttcatgctggacttggaaaagagagcctctctgctcaccgaatgagagccagcatgccattcccagctagttcttcctctgccatgttagcttttctttctcccttagcagacttgaggctccttggggataagacccatgccttattcctagttgtcttcccagcacatggcatggaacctggaacatagctgatgctcgaggagtgtttattaaggaaatcaatgagtaggtgactaggccagcagcaaaatggatgggtcacaagtcctgtgttgttatactctctggggtcatgccctaggtctagccatgttgccaactggtgccatcagtgggaaactaatcaagtattaaggagtaggcctggcatggccacgtggaccttgcacatgagttcaaatgcatattcatatgagcctacatgcatgattaacttgggaagctgacaggaagcagtcaatctgttgagcaagtttgtgttttataaaccagatgttcagtattattattcatcatttcctttgatacccaaatggtccccattatgtagcatgggaaatgaaggatatggaataatatatacttagtatacaacagagcaccacaaccacaggtttcagaggcctgcttaaagcctgggcaagtgtaattgcatagcagttcattttaagattcccacttggacttaagttaatgggattttgcccagatggaccatggtgacccccacctcctgctcctaccccttggaaaatgaatgttgactctacgtctgcatttttcttggaagccacatgtatgaatcataagcagcacccttgcctcagtagcagctacaggttggggggccacagaaaagcagggacccccctagcaacgtgttgggggacagagggtttctggccatagttggctgcataacttctgcttggtggtctgggaaaaaaaaaacaaaacttgccattgactgctatttcctatggcaagagtatagaatgcctttcaatcataaagtgcttacagtgcaaatgaacttgcaaattgatgtgtttctccatgaaacgtttaagattcacagagtccagacctgtggggactgggaatgatggagctggtgggtgcagaagagagtcttaattttctgcaaatggtatttctgtgttcctgccagtctttgttgccataatgatgaactggtatacataggaaagcctacgggttagggttctggccaagccagttcaaattggggccagaactgcccctaggagaggtccatgagatcattggcccacatgtgaactgttgccagactgaactgaatgcatttcctttgtttacctggggctggttacaaatgaatggtttcagtacaaatgcaatattatgggtttcttttttaaagtaatgatgcagtaattacatttggaattagctcctgagtgaagttgatactatattctggcttaatattttgaagttagtttctcataatcttgtctttgtgccaggacaattactagtaatttataactgatttttactggttgcaggaaaaaggcttcatttctcattattgtcaatggtatgtttttatttcatccatgttacatgttggcactgcttgaaatttgatttgagttgcaaagtggaagttgtgcggagttatggatcagctcaaatcagttttctttatagcattaacgattaatcaaggagtcagaatatgggaagacttctaattctaagagaactatttaccatgggctggttctgcctttgaaaatggccttgcaggtttccagtggtggccacagtatgctttgagtattttaagcaagatgttagaaccatgtttccaaaaactattacagactgtatatactggttgacttggttcatggcaacactaactgtcagcatcatctcatagttaatattttttgtttattatattgatgaattaaagttgtttacatattctttcacccaaattagggtgcccaaaataatcacttatatgattaccatgtatattattagtcatggttctctagagatagcctatagagctagagataggctatacagatagggtggggaggaatttagtttaaggaattgggttacacaattgtggggctggcaagtctgaaatctgcaaggcaggcagtctgacatgctggaaattgcagcaagagttgatgttgcagtcttgagtttgaagacagtctacaggcagaattccttcttttgaggggggccttgtcttttctcttaaggccttcaatggattggatgagacccacccacattatggagaataatctgctttactactgattaaaatgttagtcacatctaaaaaacaccttcccagcaacatctagactggcagttgctcaaacaactgagcatgatggcctagccaagttgacacataaaattaaccatgtcaccatgagttcccagtcctagacagaccaggagattcttgcttcattttacttgtcacggagggatataggactatcttgatatccatgtaaaacttataaaagcatggccccctccacccctgttgggagtttttttccaacacctgccagcttctctttagctgtcatgattattggtggaaatgaaatggaaaggattgccctatacgaatgcttcttgcattttaatatacatacgaatcattaaaataattattcacattcagagtgtttggaatggggcctgagactaacaagcacttaggtgctacaggtgctgctgttctgggtactacattgtaagtagtgacaccccacagctctaataatctattagaagaacaaggcaaaagaaagactaagtttaatgacctttactcaagagaccagccagtcaatgggggcttcaaacgcttagattttaggatcttctctttataatgcctctttccaagtagattgagggagcaatgcctgattattctgtggaactaaagctatggaagagaagtgtccaaatatcagaaaacacgctaggttgaagatagtggattctagttcacggattgcttcacttggggcttgaacaggctacgaagccagaaggacttgcctggtcaattttggtgcctgtcagcagtgcctccagccttaatctcattttggactctgctacttactagctgtgtgacctcgaaggcagagaaaagaagctggcatcctttgagcacttccatatgccaggtaccatgctgggcagttttctgttttgtcttcatggcaacagtgctggggaatagtgggcattatttcatatgagcatgtggagacttcactagtgcagttaggaaagattcagagctgagatttagaaccagatttgtcttgggccaaagcctaccatgttccaagactctgtttccctatttgtttgggacagagtaggggttcctgcctgtctcccaacactgtgtaaaaagcaggtgcaatggtgtgtctccatgtgtctgtaacccaattgagaggtttacagacgtgaatcacatgctgtatttcaagggccattctttttttttttctttttttttttttttgtttttgttttgggagagagtctcgctctgtcacccagcctggagtgcagtggcactatctcggcccactgcaagctccgtttcccgggttcacaccattctcctgcctcagcctcccgagtagctgggactacaggcacctgccaccacacctggctaattttttgtatttttagtagagacggggtttcaccatgttagccaggatggtctcagtctcctgacctcatgatctgcctgccttggcctcccaaagtgctgggattacagatgtgagccaccacgcctgtcctcaagggccattcttataagagaaatgattaccttcttcatcatgattttagaagtcagataataaagttattatttaattttgtttttgttttatttgttttccatctgggactggcattcagagacccagagaggtaaaacagccttgactggctaccttggggaaaataagtgcatccagattctgttgtttttagcaggggcaactcaccagaccctttatgtgcatgctttctgatcctcaatatttagattacggagaagcactcttaagaaacataagtgtctgggaggcaaaatagtaaaataaacctgtgctaataaaataaaatgaatcaggaagatccaaacaaggttctctttgaaccaaagtggctgaaagcagagaacagatctgctagagtgactaatgacaaatgatttgtttccccagctgggggctgggactgtcctctgcaaatccaggacacacattgtgctccgcgctccactaaaggcttgagtgggcactgttccatctcaacagcccctggtttggaaaggacatgattgtcaagggggtggcctccagaactgtggtttccagaccgttccccggtaactggcttttctcttccatccagctgactgatgatcagggccccgtcctgatgaccactgtagccatgcctgtgtttagtaagcagaacgaaaccgtgagtacagtcgctgagcttcctgcttgatgctaggagggtggttttctcagaccccctctgactccagctctggtgacttttgatttttaagcataggatgtatgtcatttttccttattgtttgatcttgctgttagaatcaccaaatcaaaaacagatgagaggaacccaggctggcatcattttagagttggcaacacctttccaaagtttaagtattagaggaccagaggaggaaaagccccagagaccatccatgattatggtgcactgaccactctcatttatagttaccagccttttattagtttcctagggctgttaggaatgaagtgccacaaactgtgtggcttaaaaaaatagaaatttcttctctcacagttctagagcctggaagtctgaaatcaagatgtcagcagggccatgctccctctgaaggttctagggaagaatttctccttgcctctttcagcttctcggggcccccagcattccttggcttgtggcagtgtcactccaatctctgcctctgtttccatgtgacctgttcctcttatatgtctctctgtgtccttccctgttgtaaggaaatcagtcatgggatttagagcccacgctaaatccacgatgatttcatctcaagatccttaacaattacgtatgcaaagatgctatttccaaatagcattatattctgaggttctgggtggacatgaacttggggggacactgttcaactcaccataaagccttaaaaaaatggcctttctgacactgaaaagttttagcaaatcacaatggctacatgccttggaaaatggggctccagaggcctattccttcaccttggtcctcagttggtaaaagtgttagggttattatatatttctcttgctatttagactctctctcctgggcaccagatggcagtgtaaattgagaaagcagttaacatgctgtctttcctgtaaaaagctttcataagagaaactggtgaacgtttagagcccttagctgctgaaactcttgtgtttcttcaaatcagtgtttaattttcaagagaggagagggaagctattgtagtatcttggtaggattatgcgttggggactgtagtagttaatggttggcctgagaagctctcattttacccagtaacattttgggtggagggtgggggatagaagagaccattcttggagatatgggttaatcctcaatctgtatcagtttggggaaggcaccaggcagacggtatgtgacttctcgtgagattctatttcttttgccaagttaacttactgttattataattcaatgtttattttcgacagagatcgaagggcattcttctgggagtggttggcacagatgtcccagtgaaagaacttctgaagaccatccccaaatacaaggtaatgaatgacctaatccctgaaatcaaagcaacagagatgcccagagccttgttttcacaaagttcaggcttcaaactctactttggagcgatgtttttgctcaccactattacagcctgttagcttgtctttataccatctgcacagttatttaaaaggttttttttttattatttacaatgacttgctgtttttcttatttacctcctctaacctcagtttaaagaatcaatgttatatcttaagttttgacatgatcattgaatttttctgatacacacaggatatcaacatgactggtttgccttttaaaaagatagtccaggccgggcgtggagactcacgcctgtaatcccagcactttgggaggccgatgcgggtggatcacgaggtcaggagatggagaccatcctggctaacacggtgaaaccccgtctctactaaaaatacaaaacaattagccggtcgtgatggcaggcgcctgtagtcccagctgctcgggaggctgaggcaggagaatggcgtgaacctaggaggcggagcttgcagtgagctgaaatcgcaccactgcactgcagcctgggcgacagagcgagactccatatcaaaaaataaaaaaaaaatagtccggagagttcttagaccccatccagaaaactctcctatttcctggtggggactctttggaaaaacaaatcaaaaagtgggagggggatgcccttgaggcacaacccaggcacacagcactgcccaagagtgctctaaatgtaggcatgagcatgtgcatgccagaggcatcagagagcagcccccaccagatctggttgattcactggacgaagggctccactggctgcacaggggcgaacaccacatccacccccttctcccccagcaccaagctgactggctagctggtctccatttctggcccactcagattaacgagggttctctttgtctccatctaaagggagcccaggaatcagggattattggctgccaggggcttctttcttggcaccaccctccctgatgtgctggggcctgattcaccacagctgtgagggggacctgggctttcctgggcctcaggtggaggcaggcagtggttagagcttgactctgcaggttcctggctccatcgttgatgaggtgggtgtggacaagtccctccaatccctcgttccccagcttcatccaccagggcttttataattggagttaagttcccagaggcatgaaaggacatttcattgatccaaacccacataataaatattggaaactgtagttcctgagaaactaaaagtcaaagatggagatgagggaagactttgaggcccctaaagatagtggacttgacttttgatgaaattgccagacctaggtgtccagaactgctggctcagtttcagaaaaggcatcccacctgtagagaacttttccaaacaattcttgagcctcttatttcacatgaggagatttagaaacctaagcaccgagccactacttgatacgtgtccaataaatcaagaaagaaggaacatgacaaggaaccagtaacaattatcctttgtgtccatttctccaagcttcctctaccaggcaatgtgcagagctctttatggcattatctcgcttactaagtaaacattacggtcacccccattttatagttaaagaaactgaggcatggaaagcttaaatatcttgccaaatctcacatcttgcaagcaggagaaccatgtctttttttttttttttttttttttttgagatggactctcactctgtggcccaggctggagtgcagtggcaccgtctcagctcactgcaacctccacctcctgggttcaagcggttctcctgcctcagcttcctaagtagctgggattacaggtgcacgccaccatgcctggctaatttttgtccttttagtagagatggggtttcaccatgttggtcaggctggtcttgaactcctgacttggtgatccacccgcctcagcctcccaaagtgctgggattacaggcgtgagccactgcaccctgccaagagccatgattttttttttttttttttttgagacggagtctcgctctgtcacccagggctggagtgcagtggcatgatctcagctcaccgcaagctccacctcctgggttcacgccattctcctgcctcagccccccgagtagctgggactacaggtgcccgccaccacacctggctgattttttatatttttagtagagatggggtttcaccatgttagccaggatggtctcgacctcctgacctcatgatccacccgcctcagcctcccaaagtgctgggattacaggcatgagccaccgtgccgggccccaagagccatgattttaacctctgtaaccacaatgctaccaagaacaataagagcaatgacaatcataatagtaatagttaaaatgataataataactaaaatacactaaaacatttattgaacttcttactatgtggttggtgtcatccaaagtactttacatgcattattcctgttgaattcttattacattcccatgaagtggggacccttcggcctcatttttacttaaggatgcttgaaataactttctcaacatcattctgctagtaacagatgaaggaaacgaagcataacaagggaatagaggaagaagatcaactatagaaaattaaccagcagtgcttgaaatgcaggcatgtgtgttttgtgcttttccaagggtcaagctgggaaccattgacgtagatatggcataagttaacctaaggcatccttccctctggttcccatacagagctttgtgaaaggggtacgtgtcagccagggacagccatggccaaatgggcccctctcatccaggagaggagagctccagggaacagagttcaggtcacaccttgccctcctgattaacaccttgtaaagatgagtcagctcttggctcttggggttttcccagaagatagaattctttctttctcccttagcttcatagattttcccacaagcaatcagacttcctgtaatttttattaagaattccagacaccccagcaataatttccagacaccacgacctctgttaacataacgagccattttataattgggttcacttcattagcccagactctccagttggaagggaagtgcctcctttccccaggctgttggaccacgtggcttctggcctccaggagaatatgcctctggtccagggcccctttggcaagcccaagtgctggaaggccttgtgtccgatctgttctccattactccatggcactgtacattagaatggacaggaagactggttctattttggataaaaccaaaattagcgatttcatcagtgtattgatttgtggccaaaaactaatgttggacttcgtcatataagcttttaattatttgagagactcatccacagaatgtgttgtattttgagatgtggtcagagctgcccttcctttgtctacattaggatgtagctatatgccatcaaccaacacacaaaacattctgatgttattttctcagaatgctttcctggggaggattttaaccagtttctgaatatcaggaagactttctcaggtacaggcttaagaaggactggctgtgcatctcctggagcaaattggcttctccttttcagcttgtttttaatatttactttagttggaattttcaagatgagctaggtaacatttgagttaagtggcaaatgtctaaaatacacaaactgtaactgaatgcctgccacatgcctgaccttgtcctagggactgtagaagtcaaaggtaagtgaggtggcccctttcccacaaagagctcattctgatggaggaagtactgcctccagttatttcttttttcttctcttttcttttcttttctctttttcttttttttcttttctttttttttttgagacagggtctggctctgtcacccaggctggagtaccgtggcacgatcttggctcactgcaacctctgccttccaggttcaagcaattctcctgcctcagcctccagagtatctgggattacaggcacccaccatcgtgcctggctggtttttgtatttttagtagagatggggtttcaccatgttcaccaggctggtcttgaactcctaacctgaagtgatctgcctgcctcagcctcccaaagtgctgagattacaggcctgagccactgcgcccgaccacctccagttctttctaggacaaatcagaggaaggaaagagaactacctagggttgagaggcggaaaagtgagtgtagcttttttttttttttttttctttgagccttactctgttgcccaggctagagtgcagtggtgcaacttccacctcccgggttcaagcgattctcctgcctcagcctcccgagtagctgggattacaggtgcccgccaccatgcctggctaatttttgtatttttagtagagacagggtttcaccatgttggtcaggctggtctcgaactcctgacctcaggtgatccacctgcctagcctctcaaactgttaggattacaggcatgagctactgtgcccagccaagtatagcatttttagatgctagagtaaacatagtgatgatggtatggaaaggacaaagcaaagtgcaggtcaggagagcctttttacaagagatgagctgaggctgagcttatagcatgggtgaggattagccacagggagagagaaggaggggtgccttgggtagcaggcactgtgacaataaaggtctggctgggagagaaaattgcagggggattgttactgccgtgtgccttgagtggcagtgagtggagggaggcagggttgggtactcaggcaggggccagaccccagggagacctgatgaacaggcctatggctctgtcttacatatgaaaggggttgttagtggctgtcacaaaggaaagcaacgtggtcagaattatctttgacttggatcaacctggaggatggttttgttggggtcaatctctgaggcaggaagagcagtgaggaccattgtggaaatctattgaattaatatagtagtggtacagttgggtagcaggatggaattggagcaaacctggagaaaaacattagtaggatttcatactactgatgctgcagtttctaactggggagtctgtgtggttggtggtgccgcctactgagagaggaggaagaagaacagctttagaagaactccactgtgactgggtgagtctgaggtgccagagcaatggccaagaagagatgaccactaccctgttggatacttggtttgccactgaagggggagactgaggccagcacatggatctggggagcagcagcacagaggtggtcactgcagcttattgagggagaggagagctaaggcagacagtaggtactggggacagaatcttagggaaaatgagtacttgaggaatgggcaaaggacaaagatcctgtgaaaaggagaaagcccaggagtatgggacctggaaactgagggaatagtgtcgaggaagaggaagcaatgggctaagaaaagtaggaagatttgagggagaaaatcctgtaaggtttggcaatgaagaggcccctggcaaccgtagagaaagggatttccatggcatatttggtggtggagggagggcaaaggcagaatgcagtgggttgaggcataaaggggcaataaggaaacagagatggcacttggttaatgaatacaggacattgggatgggaagatgagctcagcgtctgcattctgggggaggaagcagagagtttagctaagctgtgtagaatctgcactaaatgcagtttcttctattgtttccctacttccacctttttctctttcttctttcccttctcatctctctattccaaccaccccgccatatattgttaaccgcacgataggacctttgccctcatgaaacttacattctggtaggggaggcaggcatgaaataatcaaaagtcctgattacttatactcaaccccacagataattgattattataattttgataagtactataagagtacaggcattaagaggagtcctgccttcttttgaggattgcttctcacaagcaaaagaagaagaaccaaagtaatgtacattagaaggtgctgaatacatgagctgactataaaatattatttgttttgtttaattttgagtttgaattcccaaatacaatttttgcctttaatggaaaaagccaaactctcaagatttttttttgacccctccagtccatctgaaactaaaacataataatggtaattaatgcagcgttgactgtgtctgacatttttccaagagacaagatgaaagagacgatatacatctcaaaggataggaaatctctggtttatctttcacagcataatgaaatatacttttatcattagagtcaagtagaatcttattaagacttgctgtgcaaggtaactccagggaagacgtctgttgcccttgactaccatgtgcatatttgctttatgtagtgcaacggaaacttttaattgccagtgttaaattctctgaagttaatttcacatcaccttgacgttaagctaacaggcagacagggtcattcctggtttgtaaactctgttgtctggatcatttaatagtatcatattcaagaatgtgagtggcagagaatttaaagaaaattaacagtggggctcagaactgtgaaaaaactcctcaggaaaaaaaaatagaggatttcttttttcttctcccctttcactgctctggcaaaactgggttacattttctttcttcagagagacagatcagtatgggttttatgccagaggccgttttaatacatgaatgatttgtaggtaaatttattgtagccaatgggtgcagtcaactgtgtaatagaaatattgtcaaaaagccgggattattatttaaataagtgcagtgttaaatttgattacatactttttaaagctaataaaacatttcattgctcacaaactatttcccatagtcccatttagtcagaaaacataaatcaagtgaggctccgcatagaaaattacccaggctttgtgttgatggaagcatgcatggaaaagctaggcagccacacaatttgaagacgaaaggatatgaaaagggttgccaggctcctgtgtaggctgggacagggggacactttatatttgaagaattatggaaaatgacggcctaggggagcgccaatttgagatggcccctgtgggcgtggaattatacgaagtctagaagtgaggcagcgtggggacccctctttccttattacaggcagagagaaggcacctccattgataaagttctgtgcacttggacatagggtctttacagaaacattagccactttcttgttaaaaaaaaaaggtaattgttttgttttaaataaatcaaaataaagcccttggatgccaatgtggggatgtgacattttaaattgtgctatttgttgagcttatcctctgacaggtcttcatttccaccaaatgtcaaggatcagtgccttgcattcattttaatgaaatattgtgctgataagggttatgaatgacaagttaaagctgtaaattactaaatgccgggctgctttatgctttgtgaattcaccagggagcaagctaatgaaggtttctttcttgcttcctcttacagttagggattcacggttatgcctttgcaatcacaaataatggatatatcctgacgcatccggaactcaggctgctggtaagagaaattatgtacttctgcatttctgcttttatgattttaaaagatttccttcaattcaacagtgatgacactttgctgcagttttcacttttaaaaaactattgaattcatagcattgtaaagattgttatagagtttataaactggtatttggacacataatacataaataatgttggataaatatatttaccattatgattttgtatataaagccatatatgtgtatatgcatttatttatttatctcacatctgccaacatatggaaaatttttttaactctagacagcatgaaacctatcataacgggtcccttgatgtaatacatggacactcatactccagctctagacccacttactgcaagtctaatttgacacgataaattagacccaagatccctggaaatttattacaatgggatttgcccccaaattacattacttaagcccagtgtcttgtggatagaagctattcaacagcttttttgttaaatcagggcagctgagatttttctctgtttcctgcctatgtcatatccagtagcattgcttggtgaactgatatgtaaaccactttctttctctcagtatcatttttactgtctctgaagtgagtagggttaggccaaatccaaaacagcccatggtagcatcaacccacatccctgggcaaggctgcccttggggcattggccacaagtgtgccacatgtttgccacccctgaactagttgcagtgtgttgaaaaaaggacatccctttgggtttgtgtgtacttagctaatttttaaagaagatatagaattataaagagtaatgcagtgaacactgttttttaaagttaagaaagtgtagatcgttttctttagcaatcaacaaacacacacgtacctatatgcacatacacaaatgcatacatacccatccaccccacccatcttttcccattcatcagaatgagaaagtagcggcagtgcctgctattcaaatgtttgttggcaaagcattgtggggaccagttcacttctcacttgcatcattgtttagaaacagttcatgtgagagctccatcatcatgcaactttgctctaatcgccctggtattaatggagtcatgaccacatcatgtggatgccatatgcatgctttaagatgggccttatggtaatattcaatttcaacaatctttttatcagaaaaggactgaattaactagttggctaattccaaatgtaactcagaattattgaaaagtctgattgaaaaagcggctgtctttttaaagacatttaagtccaaagacatattgaagtttaaaactcttagcacattacccatctccaggttgcccagttggcatcatttgttggaagtaagagaagttacaagtttgcgtgacagagtttggactcctagtgtgtatttattccaaattggaaaggaacagagtccatgaaacaatcaaacccaaatcttctaccagtaaatggattaatttcctatttatcattgcctgtcatttaaaggaaaaatgaaatggaatcagatgtcagaagtcaccaaggtagcatctttctctctgtggcaatggaaatgattagctgcccgccacacagtcgactcacaatgtgaactggtccccacagtgctttgccaacaaacatttgcctagcagtcttttatgtcttctggccctgcagcaaatggtgtgtttgtaaatagtccatctgatgcactctccagagctgtggcccctgagagggcagctgaaaggctcttggaaaagcagaccaactccatcaatgctgttcatctcctaagagtacagatacttgtaaacacatgccattgctgttcttctgttgacacaccaaaagtggtagtggttgctagggtcaaaagtggtggtggttgctaggattttggccatgccatacatggggtggcccaaacaaatgccccatattctgtttgtgagaacccaaaccatatgaaccatgttgcagctgatccatgacaagaacataaggaatgatcagacctgttggtcatctgtcccattcatctgtctctcaccctgaggccatcagatacttagaagaagtttagggtgataccaaccgttaagcattacatgaattaacccatctgaatgtggtcaataagtgtatgttgactctgacttgagttctgcattttccttctgagcaaaagacgcagcatagtgggagggactcaattccagcatcacactgtgaagctcaactcctagtcccactacatccacactatgtgactttgggcaatcacacaggctccctgagctgcacttttctcttgcaatcctgccataaccatagtgcatagatcgtagcttgttgtcacagtaaatgagataatgcaagcaaaggacctggtgcagaaaagcaggccccagaatatctcagaggcagtagtggttatttggacatcttgtttgtgtttattttctattgttctgtcctcagcttccgtaaaggttggaagaacatggtggtaatggatgcttaaagaggcaacctaaagagcactttttgattattcaggtgattcaggtttttgtgatagacattgggaagggatcgtgtacatacaccatcagttttctttttggttctacggcaagcttggccaactgtggtctagaagacaagtagacaacttgtactagaggttctatgtgagtcctaccatgtgaagaaaccaaggttgtttgtttgttttaaaggtagcaataagaataatactagcagccacagtagctaaagaatgatagctaagagtcagccggcatgaatacccgtggctctggcgtgcacaagttgtttgttcatctctgttttgttcacttatccctgctttccccctcctccttccttaaccaccagtcccctcagcacagagcagggactcagtagatgaataagtgaagggatcctctaaaaccagtttcatttttacttactttaggttcttctggaggttgtaaatgacttgtgaacttaccttggaaatccagtgtcttcatggaccataaatccatcctggccagagctctcaggcatggctaggaacagccagctgctagcagcttctctggctagctcaggcagggaaccctcattcaaactccatttgtctcctcgcaagcccagccatataatcgaatccttattacaaatggacgatccccttagttctggccaaggctgccagattagcacggtgagtgtgagtgtggggttgtggccagcatggggaggacacagcaagctgacttaaaataactcctattccctctccatctgccatggactttgtttcggcccctacagccagaggaaagaggtgggtttctctgaagcacaataccaatatttttctaatttgtcctataaaatctttcccctgaacttaatgtttggcttgattttatccagtattttctttaatcttgtgtgatttggttgtgaatcacaaagtgtctccaagaacagctcagacataggggccttaatcagcggactcactttggtttaactggcaaagctgctgaagcaatgcttctctgtgatctctgggctctccttagtcctcctctaagggcttctcaacctttctgtcctcgccaccagcttgtgacttcctgatagattaactgatgttggttcagcaagcattgcccttgtgcctggtgtggctcagtcctgtgttagactgaagactgatgaagtaatcttcaaaggggccggggggctgcagcacaagtggggacagacacctgttctcaaggtggggaatggaacaacagcacgtagcaagagtgattaaatgctcttgatcttgagaaatgctttttgagttgttatgatgcccctggaatgtttgtttgtttgatcgttaccacttgttaaacattgaagtatagctacagactagattttgttttcttgctttttataattcctttgtatttgagagctttaggaatttttcttagaatgtggagccctgaatagatctccttttcttttgcccaacagcggattggtcatccatctgtccctaccttttagaataaagggacagctaaattgatttccttcccccaaggaggaggtctggaatgtggacctggtcaaaccgacaggagaacacaaaggaggttccctttcagcagctgcagcaatggcagggttccacagaggagcctcaggcaggcaaaatttaggactcatttccatgaagcctgcattgaaattggccagaagctgtttgctctgtgtctgcaaacccaggagatgaggaaggatgctgtagggttttcattctggatgaaaatctgccagtcacatgggtcacatatgtgggagtggatgagatgggaggtaaaaatgatggagagaaattcacattcattccttcaacatacactgaatgttcactatgttgtaggcttgagcaagctgctcagagaggtcacagagatgtgccctacctccaataactcaaactctaataggatggatacgatacgtgtatcagtaactgtggacagtagagaagatgcgctttttatttgtttgttgttgttggtattagtatatttttctaacattcactgattcctttttatgggacaggaactattctaagtgtttcacatgtgttaatgcttttaatcactgactaattgaatagcaagcctaggatattatgtgccttggaaaggcctagaggcttaaggaaaggatgaaggggaggggaggtccaggtggaagatacatctagcagcagcctggagttgaagtgaggacaactgtgagtactgggctgagcagctgggcttctctaagatgaaggtaaatatcctcatgttacagatgggaagctgaggcactgagtcctaaggtgacgtctcccagatcacataactggaaagtgccagaactaggacccttaaccccagtcagtttaggtgtactaagttcactctgctgcgtgggttcttcaggaaatgggaggcagagtggttggagggtgggagtgactgggatacctggtctttgcagccatttggaccagtaccgaggtaatcatgtcagaatctgtctagacttaacactgtccagtaggaatataatgtgagccacaaacaggagctgcctatgtaatttcaaattttctaggagccacatctaaaagaatacaaaagaaacaagtgaaattaaatttaagaatatattttattatcccagcatatccaaaatatcagtgtttcaatatataatcaatgcagacattattaatgtgatattttacattcttttcatgctaatctttgaaatatgatgtgtatcctacatggcacatctcaattcaggcaagccacattgcaggtgctcaagacccaccagtggctgtggcccccataagggacagcacaggtctagagtgtgaccagacattttggacccttctagataaaatggattataggacctcctctttccttaaagtgggttagagcaggctctatttccaccaccacccgtcattgtgccatcctggaagtctgggccaacagttagtggccagttagcctcctctgccgtggccaccacccctccctccctcccaggctgtagcctctccagtgtccaggagtggaagtgggaggttgcccagaattcaaggggccttgacttgattgccagggcagatgagctccatagtttggcctggaaactctgcctattctagccatgtaggttcacccctacgccatctagacttccgcagacaaactgtcatggaggccagtgggtggaaagcagtagccacactaggtgaacctgagcacttaggtcatctaaatcagaatgttttgatgccaaagccatttctgttgttctggaaaactcagatgaactcttgaacgagtttaagttttcctaacccaagagtcctcgcacctccgctggaatttaatattgctgtttccaccaccagctctccacagcctgggttccaggatggcactcgcctttccctgtgtcactctggactgtccttgccccattccaaacatggattctgcttctttgttcttgtggattcctgggcagtgcacgtttgttagtggttatagatgggtcctcatgaaaggttattaaatccatggattgatacatggacatgctaatcagtgtaaatgttctcacactttagtcctcttgtatggaactaagtggacatcccccatggacacatgtgaatatgtgttaaatgctaactagacagtgcacatcaaacatcagtttaaataagggtttaaaaaggtaggagcacttctagaatccagctgacttagttcaagcaataggccataggaagagattctgtataattccaaagaatttagatgtgaaagtcaaatggaatttttcttaactatgcaattccgcaactgaggaaatagcaggtcctttcgtccgttcctcagaaaccgcaagctccttcctgctccaaattctcatgctcaactcttctttacctgaaatcttgtcccaggtacaccttttactggcattttctcatcctccacttcttagctcagatgtcacctcagagaagcatcgctgcgcccacccagagaagccatactcctccatcactctccatcacatcccctgctttagttttcttgaatcaccactcttggaaaacgtctattgtttaacttctcccctgtggtcctttgtgaatagctgggagtttgctactacacagagcgggtagtcagtaaatatttggtgaatgatctgcaggatgtttgagtgatgctgatggttggatatctgagtaccagtttcttacaataaatgagaagagcaggtgacacacgttcattcaccaaacatttgttgagtccttgctacgtcgggtgcagaaacagaaatgtggttggttaagctcccttttcttttcatccctccctatcccctcctgcttgcctgcaagcattcatcagatgtccttaagtccagcactatgctatttaatggagacatagaagcaggtagaaggaggtctctgcccacaagaagctcatcacacaaagcaagggttccctggtggtaagagggaccaagaagaactatgggctcacagacaaagtctctgcttttccttagaggaagggtgccctgagatgcagaagggcttcccagaggaggtgggggaggactgcactcagcagatactctacagtctccccaggatcactgacctcaggcctgacttctctgtctcatctcaggaccatgcattctgccggccacagcctatgggggtggggggatggggagttgggcctagcattgttcacggaactttcggtggtccccaaatgcagggatctgttgccagcctcctggacccccgctctcaggctgctgctgaactgaaagagactgtccagtaggtggcgcgcgggcaccgccgagtacccggtccccatgcagagccagcccctgccagtgcacattctcagaacagagcccgggcgactgcaacctaggcctggtctgagtccatttcgtttagtttcaaagaaagaattaacagaggcttagtaagtgtatctgctcagaggagagcgttctctgagaaaaaataaacaagactgtgtgaccccacgtagcgagcctgttcttttggaaatacatcatttggtttgaaaaaaagaaagaaaaagaaaacagagccttgtgtgctttcttcctgacggaattggtgagggcaccgtcctcactgcctggtctgggcacgagtggacagattgcagcgttgaggggagggcttacaactcaagtcagtgggtgcctgggtttctgttgggtgggagctacgccctttctgcaaaccttgagaacccacagctcctgtgactgggtgtgtgcttggacactcaagggattgatggggtctggaatcaatcccacaggtattttttttattatggacagtgtgcttatgaatcccctttgggtgccaggcgccgcagcacccaggctaccaggaatcacaacactgccctcaccacgggtctcgggccaggccttgtgctgagagccctgggtgccttgcctgggtcagttctcattgcctcgtgcgtggagtgctcaccacagaggggttgactgtgtgtgaagattctctatatataatgatttaaaaaattaaattaataaataactacatatttgaagggcaaaaaagatattccctgatgcttaggccaaggaatgtgtcaagcaaaaagtaaattcgggtcagtcttcagaagaaaaaccaagaagacagctatagataattacccacctctgtgagcccatagttcttctgggtccctcttgccagcaaggaacccctgctttgtaggacagtgtattttcttcataaaattaagcttattcaactgaaagaatgttctttaatcctgaagctgtgtcctcaggttatttgacaaaatgccaggttgggctgcagagcctctgtcagcctctccagacagcatccccctggccctaggatgcccacctgtatggaacacagcagtgacccctctgatctgggctgcgactctgggtctgctgagtgggggacactcacaggaaatggagagaggggaggggagtcaggctgtgtgttcacccgtgtcctctgggactggctgcaccccctctaaagcttcataagcctactagtctccgggctccggcacctgcttctccctctgacccttcatgcagatgggtgggtgcgccccactgtttctaacttcagggtgctgcaccatttcctgtcatttcctacaccctgcccaggcctttccaagagcctctttactaaatcctccttaatttgccagctcatgtataccacgtgcttcctgctgtggccctgagtgatacgaaggtgagaatacatggaaggtttgtcttttatagtcattactctgccaggaaagaaagagagaaagaagaaaggaaatatggaagaatgcaaagaaaagtgaaggagggagagaggaaggaagaaagagatggagggaaggaaaaagaaaaaggaagaatgagagaccctctgtcctttattgattgattcattcattatttatctatctcccattgtagtgggagtggagaatttccatattcccttccaataagctcccccttctgctcaagtgattaagaattgttatctgttgctggcaaccagagcagcctgactgatccaaccatgaatcccaaagtctgggaaccactgctgggtgtggctctgacccctgctctcaaggagctcacagtctgacaccacctcctgctgccctgtcacccctcctttgtaaaactttagtcctctcagcctccccttcccccacagaggggtctgtccccattcctcaagtcttcttgcatggacctttgagtctgggctccccacgacattgtagaaatatcatgacacatctgctcctctgtgctgcaagtagcatgaagacactgatgagactgtgttttgttcagctttgtatatccagggcctggtgaggtacttggcaaaggaggtggaatgacaaataaatgacgagagaaaacccatgtgtaggaaatcgagcacacaatgaaacaatatgttatcaagcaccacggttgagagtactgacaagaaggagaatttatgaaagtacctggtgtctcgctgtgcactgggtagctagggaaggctgcagggagctggtttgcagcctataactttgaggccacagtccagcatgcttgggagcagcagaaggcctttcagataacatggatgagttacttgctcatttgtgtgtgactggaacccttcctcccttcctttttcctcccatctttccctcccccacctgctcctgtccttccctcacttggcatttgtctgttgaacacctgtcatgtggcagacaccctattagatgccaaagatctagtgataaagcagatagaattgtccctttatttggtgttttcattctcatagagaagatgtgggtttttaaagttctaaaacaaactgataaataaaaatactacacaatttggataagctcgccaaaagaaacaaaaatctgagaaaacaaaaagtcgggagaggtacctgccttagttagatggtcagggagaccctttcttaaggatgatggttttttcgtttgtttgttttttgtttttgagacagaatttcactttgttgcccaggctggagtgcagtggcacaatctcggctcactgcattctccacctcccaggttcaagcagttctcctgcctcagcctcctgagtagctggcattacaggcacctgccactatgctctgatgactttttgtgttttagtagaaacagggtttcatcatgttgtccaggctggtctcaaactcctgagctcaggcaagccacctgtcttggcctcccaaagtgctaggattacaggcgtgagccaccatgcctggccaggatgatgtattaagctgagtcctggaggatgagaaaaactgtggagactggtccaggctgaagaaacagtgtgtacaaaaactctgaggcatggggatggtgaatatgctgggttctggaatctgttcatagatttaggccagattttcaaagaagggtaggtgacccaggttttgttgacaaattcctatttgaggctgcatgtcgtgaagtcgttgctggtactgccccgtttcctccactctgctctgaccattcctgtatgtgtagcatggctcatacctgacagcagctaggtgaaggctttctctggcttctgtagtcatctcttctcaggcatgcagcagacaagatgtgacgagaaattagcatccctcagccaaagactgcccttctcaggtggggtgtctctgagggttgtgttttacactggctcccagagttccctgatgggattatgccacagttgcccgtagtggtaacatgcctgcaccctgttggctgccctcccatctctgaatcactttgccatgtccctgcgggtatttcctgggaatccctgtcaaataaaaactttgcacttgaatcctgttctcagggacttctgagagaattcaagccaagacaccagcaggctgatgtgtctctgcaaaaattgatttgctgtagactagagcttcaaatgcagttttgagtgctctcacataggcttttacattaacaccatggcgttgagcatgcttcccattccatttcaggcccctgagcatgtattcctaacacaccagcctgcttggagaatccacatttgcttgtagaagtaccaaggagccttggctttatgctattaataactgagagtaggcactttaaggaaatttgatttagaagataggattctcggctgctttattatttgaagaaaggatttgatgaggaaaaggcttttcttttcactggacacactctgacctttgttctactagattaatttcatatctagaatgccccatcttggatgatgaattagcaataaaaacctcatcaaaatgtaattacaggcaaagtgttgaataatgatctcttaaaaattcctgtagatttgtctgcacctccttccccttgtgggggaaatgagcctcagctgccagctactagcctcagctcaggaatgcagaccctagccctattgcaaggctgggatgtgagtgctggcttctaacttgcccagtgtcatctaattgatcaattgcttttctccatgtgattgatgcacatctttatgtaatttaaaggaccatctcaccgggggtaggaatacacaggaagtaggagctcaaggcagaatgaaacactctcctcttccatctgtgacagcctgctggggggagagagttattaattaaaatgttaactgcccagacaatagcaggcagaacagcttggagaaagcctgagaagcaggcattgcattagaactttcataactgcaaattccaggaaagtttgttcctccttaaaataggaaacagagccatctgcctctaagaggagactcgactgggctgcttaagtgatgttagactttcccaaagagcacatcttgtttgtctccggggagatggacttgaccgagagataacctagccttaccctcactctgttgtgggccctgtaaaaccctacagctggatctgacagcagaatatccaaatggtcccaactgggtagatgcccacattcatttgaataactgaagaattcaatcatttgaatgccaatgattattcctctgggagtttacattttagaaagaccttccatctgaatccccatgagagcattaaattgctatctaattagcagtcccaaattatatatatttaaaagataattagaggtttgaaggctgttggaataactggttatacatttaaatgaatcactagaaatttgttggtaatgtgtggagttttcttttatttcttgctcccctctttgaagttcagtagacccaacctcgcggggttaaatctggtagcagtaagatgaaggcagacttctttaattactgcagctcaaacctccaaataattataagcagctgtcatttttacataatcctaaatgataagacccaaagaatgcaaataaaaatgttgagaccatgggctctttggcacaataatttaatccgtatcacaccactgcactgagcattgtacttcattgaggaatgtgctccaaccgtgacacacttaggtgaactttcatcatcatgtgataggcacatctatttccaaacacatctcccaggtgccatttttacattctctgtggaggttgctaggcaaagggaaacactaatacatttggaattttgaggcaaagaaggagcttggctaagccaggcaaggtttttgctgaaacttcttctcagcctcacttgtccctctctcctagagatggagtctaccccgtgcctgccccagtggccccctccctccattatgtagcatgataggattgtccctgggagcatttgtttggcctgttgctggggtttttattggcttggccacttctgtgtgccagctaaccaaggacagaaatcccaaatgacaaacggacctaccagctccaacctggtagcctctgggttcaggtcttaaattccatgcttttgatgcctgtctcttcctggaagggcaagggcctcttgaggagcaagtcaaggggacatttactgcagccatgacagtttctttcctttgaatccaatgactataataccaaagtccataagatcaaggtaggcaattcaccccaggcagagctgaagccccactctgcaagagacaaatttagaacatcatctggaaagtagatgcacacacacacacacacacacacacacacacacacacacacaaacacacatattccaaattagatcggcagcccaaggatccctctgctaaggaatgctcaagctggatttaaattgggactgagacctggcttggcagaaatgtggccaagcagaaaggttggcccagtgagctaagctggattccttgggaatgggaaatagaaacagatgaaagaggagagaagtcagaccaagggtttatctggaatatttagaagctgacagacatcacagagtatttttacctctccacagtgaagaggtgtagagattttagaaatgtatcctgaatattagaaccagttaaaatattctgattcttccaaatgcctgcttctcccaaagggcctctcctggagtttctaagtctctagctgcaccccaggaagaggatctagtagtaactgggaggggctgggacttttatctgactcccaggattgctgcaggtttttcatgaatatggggttggactcccaagttaatgaagcccatgtttatccaggctgaaatacaaatataaatgttatgttcgtatatatttaaagggaagattcatttgagcgttaatgatttgaaactcagctctgctcagtatggaattctagggacctggttaatggtgactgtaggtcaccttgctgtcatccccttcctgcgtcctcaggatacatctcaagtaggcactgggcagtgatttcagctccagactgggaggctcactagtgcctgtttctctatggagcagagcagtctctgaggtcagattctggggctgaaattcatccaagctacttaaccttcctgacctcagtttcctccgctgaaaaatgagaacaaaaaaatagtgcctactacatgagactgtgatgagggttaaatgagttaatgttcctaaaacatctagaaaaggccaaaaacataggtcattgttatgcatgtgtttattaaatgactacatagactaatttgttcattccctcggtccactcattcgtcacatattcatgggaacctgttctttgccaggcactgtcctaggcatgtggtccggtggtgaacctgaaatagtctttttaccaaagatgcttaggacctagtaggggaaacaggcaagtaagctaataatttgcagtacaatgtgatggctggggagatagggccatgggaggctgaggagagtatgggaaggacttgacctgacctagcctggccaggtcaggacagacctccaagaggagttgaaatcctgaggggttagcagaaattgaccacgaccctaagttggagtaaagagaattcagagcacatggggtggcatgtgcagaggcctgaaggcaagaacgatgatgacattttcagcagccagctcagtctagctggggagtacagtgagaggcagggagtggcgagaaagaggccagaacagcaagcagaggccaagtcacagggacttgtggaattctggactgttgggtgccatcacctaggacatgaggagctatgaggattccagcctaagcagtgatatgatctgatttgggttgtgaaagaatctctctggctggaccctggagaatggattggaagggttagagtacaggcagggagaccgcttaggggatgcctgcttgttatcaagggcagagctatcacagtggctgacactaagctgacggcaagattgatatgatccaattccaagaggcatttagaagatagaagcaatggacatggtaggttgatgggtgctgcttgctttgcctggctcacgccactttctctgattatactcacccattccagctcctgcctgtgtttccatggtcacaggcaaatataagacccagagaactcagtcttacaagggacatttggctttcctctgagttatgaatcacatcagagctctcttgggtttattcagaccagcatgcatccagaaacatttttaaaaagacatatcactgtaattgagaatcacacacacacaaaatcaaaactgagtattttgctggatcacctatccggtcgagaagacggaccaatgatggacaagaaccagctcagtttggtagtcggaacatggctggggcttagagcatatgtgtacaaagtggtcacatacatatttatactgtaaagcacagtatcctcagagggttgcagaagaagggccaccccatttgagaaaggagagagactcagctggaaggatctgggaaatttctttcatggaaaaggtggccacaaagatggagcccttcatgtcttttcttccttcataagtatcttcaacaatttttagcaggaaaagcaaaacaaaataaagctattaaaccaagcatctccctaaataaaattacacacacacacacacacacacacacgcacacacacgcacacgtgatgaaggctcagcattctgacgttggttgttggttgatgctattacaggcataaatcaggtaatggcagttggcttggaagaaagaatttctttccctcttgcctgcatccctttattaacttcacttgcaaattcattgccagcttcctgccctgcttgtcgtttagcataaaaacctgaagttgaaggctctctctgttcctcagccatctcagagatggtgagactagagtccactgcccagggactaagttaaggagaggcattggaaatggggtgacaggatatgagtcaatgggcccgaactacttaccacaggaggaaaaccaacaagagagaactccctcttccgtggtggttagccgtggcatctttcgaaagttaacattttgtagtgttgatggatactactttgagattttacttgagtgaataaaggaagtcaatgtttttgcagtttcaaaactagaatcaattagttgtccctaattgtacctcatattcaaaacggtctgacggctccacatacccaaaagtcttttgatatggtcaactgctcaaaggaataatgtcaaagaaagttctgtaaattttttaaaaagttacctgccaaatgtcacagacatactttcaaattatagaggtcctcttttttaccctggatgttctaatgacacagcagtttctgaaaacttttatgaacttggctttggagaaggcatatatccacgttcgagaactcagtgcagccctgtctgaaatttatttcgaggctgtcttgcatctaacttttgtcgaggagactttagagacggttttgtttgcctctaagtgctccaactcatcagagcagatgcccctgggtgcccacatggatctttattttgcatgcccatctgtgtgtgttccttcctctttgccgaggagcattcttttctcagcgttactcctttgcctacagcagaggtatggagttgccactctccctccctgctttcagagtgtcctgttctctgtcccattgccggcacgaaaggttcctcccagctcaactactcagcactattttgatttttatgtctagcttgctgttacaagaccaactggctttttgagaatgggagcttaaatccagcctcggtgtggtaagcgtgtttgacctacaaaaacggtggtgggctaagccgcctcctccccacacacagtgctgtgtgtgactcatggctacccagaggacactgattaagataaaggtcattcaggttttcaaagcagcctgttaattgttgtttttttttaaaaaaaaaataccaaagctgttttagttttacagcgatcaaaaggattttgtaatcatactaagagagcacatacaacttttcatctttgagatgcttaaaaacattaattaataagagcacagtaccttttagaaaaaggaaagggcttgttgtcttgacatgccccgttgcctccttcccaccttcctgctggtttttgacacaccctcatgaccctttttctctgcagtatatctgggcttctcatctttccgtgacatgtaagattacatctccgaatagaggctcattggcatttttctcttggcataatgtctatgtcgtcccattgggcatcttgtctagagaaatctgggctgtcagggagtcacacatccaaggagacagcaccatttcagtggaaatccaagctgaaatgatatcctcccataccacaagggttccctgaggccctgagatggatattggtgaaattgagtaagatattgtaagttgggcatcagcatattgctgcttaactcactgcagccactcagtttattgtaggtgttcttttttttttttttccaagacagtctctctctgtcgcccaggctggagtgcggtggcacaatctcagcccactgcaacctccgcctcccagtttcaagcaatttttgtgcctcaacctccagagtagctaggactacggcacacaccactgcgctcagctaatttttgtgttttttggtagagatgggtttttgccatgttggccaggctggtctcaaactccagacctgcctcagcctccgaaagtgctgggattacaggcgcgagccactgtgcctggctttggcctaggtgttcttaatctgacactgcttctcctctccctggccaccaagctcagtttcagggcaggccaaatgagtcagctggtaacagagacaagaccggctagtgggatttgactgccaatgtgattctgtgactgttaatgggtcttctgggtccagtcccatcagcagttgccacctgaaccaaggacctgcattagccaggagaagagcacctcaggtgaggcagtgccgagggccggtgaccaccagaccacaggctcagaaacgaggttgggctggctgcaccacgatgctgctgcctgtcagccatgtcaccacgtgacctgcctttcctgggtgctgcgttttcccatctctgaagcagttatccctcacctggagttgtgaaaatgaaacgagacacgtaccgctgttagcacaaagcctggcaccagaaacattcaccttcatgacgaatgatgggaagtgcagggggaaactgcccagtgggggaataatcgcttttttattcttttctaaaggcactcacttggaaagcagaacaagattagttactacattttataaattcctttttaggaaaacaatgaaccttgaaaagtgaaaacagtaactgattcaaagtacttttaccctttgggaaagagagcagaatggcaggtgccgacgccggtgtggtgttagtaagggcaatatacttttcactttgtatacttttcattattttccaaattttcaacaatgagccgttattacatggataagagggggaaagtaaggaaacaccaaatgcccaaagtacttagattgtgactctctcaaagtacttagattgtgacttcatgccccccaccttcccgctactgatccccaagggagtaggggctgacagaggccactggggctgcctttccccggggccacctcctctgagtctgttgcaaccagaggccttgatgtgcagctggcaacatggaatcaaaggggaggaggccctcactctgccacaggcccctctggccttcgccttgaccttgagacaaatgagcaccaagtcaggtcgaacaatctccttaaaggaatagggctatttataaacaagatactgttatgaactccctttgcctgtgaaggaacttcctccctaggggtgagctgcatgggggcaggggctgctgcatctcatcaatcagtatcagccattggtactggccaaatgggcgtgttttcaggccatatttattaagacacaggatgtgctgggctccttgctaaaccatgtttatacccatttgcttcttagtgcagcactgtaagctgagtgcccgtacctccatcttacggataaggaaaatgaggaaaatgaggcacagagacgtgcacacctagccccagaccacacagcatgtagaactgattagaatcagagtctgactccaggaccctggctttaagcacccttctcaatgggttcccttgatgaagcctgattcactggtagtgaattgggatcaagaacatgagggtgggagctcattctccctgggtgcttttccatgccctccaaggcttgcccaggcctggcacagagcctgagaaatattaggtgtccaacagtattttggattgtgtaggtgaacaaatgagtgaatgagggaaagaatggatgagtgagtgaaggaatgaagtgccctgtggccattggtccttatctcttgcatatggaggagtaaggcgtacctacatcccttctcctgaaatggtcccttgagccttggggaggagagaagacacagggcttcagaggaagtggtaaaggtcttcaccagctgaggactgcggctgcctgggagagaaacatctgccccagataatcgctggctgtcagccctcggtcacaccccatgtccagatggcattagctttgggcaaagtttcttcctctcccaccccatccccttccttcctgttggcagcatggagtggcacatatagattatcaattattagcacacacaatatttgttccacagaggctgcatggatgtgtacagctgatttcctctggcctttcccagaacacagaaagagcaaagggtttttgttttatttaaatcaacatggtcatcatcttggcccagcccactgtgcttccaaagtcagtctctaggtaacgcaaaggggtgctggtatccagaccattaaatatggccaggaaggctctgtgctgcaggcaagtcctggttccagcttgctcctcggatgagtgccctctcgtcccatcctgctaggccaagggcttgtttgtgtgttccccacatctggcctttatttgaaactccacctcgaagtatttcatagcacagaatatctttccttattaaactctcccccacagatttttttcgtaaaacaggcaccaaaaactacaaacctacctgtggctctcaaagtatctgtttataaacctttggaaaccgtttgcaattagttaatcacattttcaaaggaagttacagattatagatacactaacaaatgccatacacgatgcttaggccccggtaaccaactcctcacgcagaagaagaagaagtggtggagccgagggacctgggatttgtccccttttaaaactgcatgggagaagggagattgggcatgggagttggacatatgagaatttagttctttttctgtcactcatgggggtgaggggcgagggggagtaggcaaggagaaatcaactgtgcccagacgcaatcgtgtatcttggaaaacagtgaggcattttataaatcacatgttcctcaataatcatggaagcaccagtgtttgtgaatacttcacataacatgtactttaaaagccattcatttgaaaagaaaaaaataaaggaactaaatatatacaagttggaattctgttgactactcaatgcttaagatctaagccagctttaaaaaaaaaaaaaaggcctttaaaagggaagggggataatatggagataaagtattgatacatgaaacatccaaggatttcaggtacagcctgatccaggtgcacacaccaccttttcaggactctcttcatatcttttctctgctttccctgcactggcttcatgcccaggaagactctctccaagtagtggcagagatggccatgagctattccaagctcccatcctggcaccttagcaactcctcttttcctggataaatccaggaatgcatcccaaattgaatctcttgaatctcatttgaatttgcgtgggttatgtacccacctctgaaccagtgacatcctggagcgatgtgggcctcccccactgatcaggccacatgaaggatggttgtaccttcactagaattatgcttaatgggagtggtgcccaaggagttccctacaggaaaaccgaggtgattaacctggaaaacatggggaatgggtggtggcaggccaaagcatgggaaccttcctaatggagtgccactctctggccttttaatgtagtttcttagtaggggaaaagaggtaggtggatttaggcttagtacattagagttgtctcatagctcttggcctgttatatctatgcaacagcccactgacttttccttttctcactcaaattaatcactctgctgcatgactgtttatattctaaaggagcttattctctaaaaaagacccaaatgaaaagtgtttcatacccattttacgtacctggctaagcagacattgtagaagggcattcttaaacagtgttccagaggaagtatccctacccccgatctgtatcttgccatgaaattagactatagagacttgctggaatatggtggctcatgggctagtatgatgggaaatcttttattccatcactctctaatcattccaagtatcttgaatacctttttggtgaaatatactgtatttattgagagattataaaaaacgaataaagacatttggggaggatcagaagtcaagaattctctgctgattccacctttgccaaataccatctaaaatgacttgggttctttagcgcaggtatgaattttcggccaggagagtcttcagttcaaacttgtaagctccacaccaagcagagacatatgaatgtgattgtctgacaccatcatagtcaacaaacagcttctgtctgcctatggtttgcagaatggtgaccagtaaaattattgaatggtcttcttcatttcaggaaaatgagatattagccaattttattcaatgagcctgtgtcattccacaaaatgcatgactctcaggaatcttgctagctgaatattaaaatattttactgtgcctgggaatgtgtttgccattttacatacaatatttcatttaatactctcaacctttctttgccatggaggtgctattgtttttacccattttgtaactgacgaaggaagcttggagtagctggatacctggctcaggatcacacacccaatgtgatgtgagtggtgtgacacggcagagccactgtgaccttctcctctgaaaaagacacgtggacactttttttgaggacgaaggaacatttgttgctctggagcttgtagtcttttttcaaagctctttaacagtggttgaaataacatgaggcttagacatgaaaatttgacagaggctggtgttgggtggggtgtcctctaccatacaagctatgcgatcttatttaacttgtgatttaatttatttaacttgtgagaacctgttttcccaaatgcattatgggcaataaattgaccttaaagaagcagaattaagaaggataaaccacaagtaagtccttgggaaagagtgaagcactgtttaattgactttgtatctttagtgccttgcacttagtagtaggtatacaataaatgtgcattgaataaatgaataaagaagcactttgaagtgaccaaagaaagaacttcctcaaaatagacagtttagatccagtatcaggctacccaagaaattacgaaagttctgcatgtgaagttcaggatctgggctgtgtgagtttctggggtacctaatagttctcagtaatggttcttaggtaacagaggtccagaacgactgtctgactctaagtcctcagggggacactactatccctgccccgcactcctccacactgaggggcaaggcaccgctgctgacaactccggttgacctcgttgctgttcttttctgttcagcccaagactgcatctcacaaggaccagggcttccatgcacacaggaactttccttaacaagatccaactgctaatctgctattgtttacagtggcttctgagggaaccactttccttccccttcatctggagtggatctgatgtcataaaactgaccgtgaatgtctgttaattgaaaacctaagagtagtggggtgggctcaccgttgatcagggtggtaagagcccactggccataggaggctaggcaccatcctaggtagtggtgaggagggggagtctccagagaggtcgcagagttcctgaaatgcagttgacaggtaagaaaagagtgcatgcgtggacacttggccctgtttggcaccacagtggtgcaagatcgaccccttctggccctcccctcatcccactgggggtcagtttacacttgtctggttcaacatatgggtggcagttttctccttcatgcccagtatggcctcagcacctgtctccatagtagctgatcagtgtcaaaaatggcaacctatggttttggggtcttaaaacacttagactgaccctgcatctcacttagaaccttccagttaaatcaaaagatgaccaagctggagagaaaagtgaaaaagaaagcagtatacatgcatatatatttttccaatgtgccattaaccgtaactgatgaacgtgtaaaggggttgctaatccttagcctgcagcagagggcagactttcctacattataaacaccccacaaccagcatgaaaggcctcaagacacaagaatgtccagacacaagaacgtccggtcgataaaatggtaggcttgcagggtgactaacaccagtgatttaggggagaaaactaaaaccacttccccagttattcatgcactcatcagcttttccggagaaatgccctaacagccattacatctggctatgattcccaataccctcatctactccaggtaaaggagccatgcttagttcagtactgctgtggccagtgtgacagcgaatagatggttctgtgtgtctgcaaaatgccaccagtatgctgagcccagccccagctctggagatcagtgcttttgcttcctagctaaggagtacgggtaggtttgagacaaaaggtagaggagagagaattataaagtatagggggatatgactagattctttggtaaatgtaagtaagaagccctttctcgtatcacggactgagttttagcagctttgggatacacacacacacacacacacacacacacacacacacacacacacacacaccattcaatgggaagacaaatccaactgctaactagtctgctatgatttacagaatttacattgtttacatgtataccatataggtggagacacacacacacacacacacacacacacacacacacacacaccccccattcaaggaggggacagattttcctttgcatctggtgttttggaaaccaagaagtctacaaggtaaattcatatcaagcaaagagttaacttttctactcccaacttggagccaatgtttagaggcatctgaccttggctttcctgtcattaaaagtccctaggactgtcaccctgctgggcttctcaccctcatcggtccactcccaagccctgtccatgaaacaggacttgggaaggtaaagattgccctggctgatgacttcacggacttttgtttttcttttctttttcttcttccccttgctagtacgaagaaggaaaaaagcgaaggaaacctaactatagtagcgttgacctctctgaggtggagtgggaagaccgagatgacgtggtaagtgatttgttttcaggcctcgtggagaaggacctgcattgtacccacttctgtacctgggggcgatcccaggagttggccaagaggcccactgaagggacacctggctaccagagggacgtggagacaaggggcctttgtaccatgtgtggagttttataactcttcagccggtcagtcggaccagttgcagacaggccagccaccccagctgcttgtgcagtctactaaaaccatccccctgcggacgctggtcccctctgcagctgatgactccagccttcttcccagtacagtggatggcccctgacatcttcagtggaacctggctgggcaacagcaggctctgcctggtgcaaagtcagggtgcctgcaggccaagcaggcaggttcctgggcagcaagaattcacctgtcaggacctcattggcacagcccttgttttcagagtacagcccagggctctgcaggctcacttttctcctgcttggtcggctgcccatttcctgtaccttcccagcctttcattctgctctggccttgctgcaattgcaccccatgctttttccccacgtagattcagcctatggtgctctatcaaaagctctccttatacccatgacttaaccctgtcaggtcttcttggtacttcctcaataaatcagatttcttagacacggctgcctttgtgtgaatccaggtggactctccttaattaaatcataacttcccaggtgtttccatctgggtccctactcttccctttttctaagagtgtgtctgtgctgaggccacgtttctctgccctaccctcccagattcgtctagggtcctttcttaagttccactgttgagttggcgttgtttccatctctcactgcatcctgctctccaaagggatgttgaggagaaccatttgaaagcccagcctgggttctcatgccttccagaacagggggccagcatcacagtgcttccgctgcagctttccttctttccacacgctctgcactttgtcaccagctcaactagcataaatctctcattttcatccttgctggtaaaatgtgagagccatacctgttttagaaacttagcctcttttcttcttcatctgctctaagtctacttaaacccaagtttagacaaaataactttgccatttgataaaagctccttcctcctccatacccttttccccgcaagccaatgagctgacatagtgtcagctcaatagcatggtcgagttttctatcttcttattccttaaacactgtcacaaggatccggtcagttcttaggactgtcctgcacctaatgtgcccaccctggcttagcgcaattgtgaggagtgccactcaggttttagactcctgccaggttcaaatcccgccttctctgcttgccggatgtttgtcttgggtgagtgattatgcctctctagacttcagttttattttgtgttctttgttttatttttccccaagaaaatgagtgtgatggcagttgtccccacctcatagagctgttctgaggattaaatggattaatagattgaaaaacagagaagtacttgcactgttctggggagtaagtaagcattctacaagtggtagccattgttagtattattctgacctcctcagtcctcaggggaccctgtcatgaatgaatgtcctgtggatttacagttgctaggaatctttggaggggactttccattgttgcccttcctcttccttcttcactttatctgttgatttattttttttgttgtttgcttgtttgtgacctcactgaatcgtctccctttttgcatgctacttgaagagatgtatgactcagctcactccagtcatcacctgtgccccagctaattttcagtgagcgaatgtctcctttagtaatcacagtttgggaacactttgtatctcctcatcctactttgctttctcgttggagctgcaggcattggattcgcagcctcacgtgtgtgttcttcacctccacatgacacccaggactgcgttctgtctgtccaacttcagagttggacatctcaagcaagtccagtgcttttgttctgcacaaattgttctctggttacgtctttggtttgagtctcttaacttgtcgccttggaatatggtgcatttggaatgtgaattccttctctatcaacatatttgacttgggaaaacccaaaccaccatttctctcctggggatttgcatgtcactaattggagaattctggaatctacagaaagcatcattgtgaagtctgcacaaaatcttacatatccatgtgctgggccttgggatttgcacctgagtagcagaggacagggtttaggttgaaatctaggaaagaacatgtaagcacagcccactgaggaagaagcagtagagtctgcccagatgcagagaatttcttggaaggtgagttctacttctctaggaagtaggctcctgaatttagtaaccacagttataacctgcatacttccaaaaatgaagtaagttcatatatactgttacaatgtatataaaatagactggctaaaattaaaagaaaaaaagacaacaatttaaaactatttatagcagtatgagcaggacttctgtcccactctgcaggatgagttaggcatcagggcaggaatacaataagtagggcagatctttggcggacccgtgtgccagcaggggattttgagacatgcatagcccagtctgaattgccagtgtagatcccctctgggaagggaaaattatcttaaaaatagcgtttatcctttggttataaattctcagagatggcacaaggaattgagggtgatttttttgttttgttcctattaacttccagtcattcccaagctttccacattgaatgtgattattaatagaaaaaaactcataaaaataataactgccatatattagctcttcctgtacaccagtaccattctaagttcatgagtgaacttatttatttatcacagtgaacctatgaaatgggtgttttatctccattgtacaggtgaggaaactgaggcagagaatggatgtaatggcctaaggacatagagtgtggattccaactcaggcagcctggcccacagagccgtggtcttgacacttggatattccatggagagagcccttaagtccttgagtccaggagtccttgaagactctatttcagtgacgcatagtatatgggttatcctcctcggggggtgcagaaaagatagggagtgccttgcacatagtagctgctaaacagatgtttgtctgcatggtattgttgtgagtactgccccatagatgctgctttgaatctaactacaatcccttctgttgtggtaaaagccttttttcccctactaccctctaggcaactacattgcttcatacccatgatgactctgatggaaaatttctccggagtcttttttgcccgaagccctataaggcaaaaaagcctttttcatgggacatatttctgagaccttagtccatttatttgattcttttttatacccttcccagagtgtctctccagctcatgcttgagctctggacacccaaactaagcacagcactcccccaccccctccaaacccaaactgacacataggggaggaggaagagagagagaatgttttgcaggttctccatgctcaagtctgttttcctacgctggttgaatgcttgcttgggaatgacagacctgtttatccactgtgtctcccttcctctttaaactgccagcttgtctgtggttgcatgtcattaggggcttagaaatgcaggctgcctgtgcaccagaaaaggtgaggctcacgttctaatgtggacaatgagccaccattaggagcacgagctatcattccataatcatacacacaacttaaggtggccagtgaatctctggggaaagcttccttaatgaactgtaacatggctggtcagagtagcagactaacaatgaaacaggaaacgtggcttccacctgtaacgaggttggcaggaaagtgggtgctttgagtggttatccaaggagcttctgcttcagcactgcagaagagagacacattcaccaggggctctggagaagcacatctgaactggacaatgcagggcccaggggaaagggtggttcccagagagcggagaggctgatcactgtcgccagatgagtattttcagcttgaggagattttaccttttattttattgagtacactgtggtacaagctgctttaatgtccattgcattaccacacttgcgaatgcttgatatctgatatggaaaaatcaaggtatgccactgatgttttaatttgcctttctctgactatgtgttaagttgaacagctgcacatgggttttttaatgactacataatatgctaacatatgggcacatcaaaacttgtttggaaattttcctccgccaggccatttgcatttttccagttgttcactgttgtaaatccaagcagtggcaagttcaaagcagtgaacatcttgccctccccgccttaggtggggactgattgcattgctcttccccatcactttggcctgtgcttaggactcctctgccgtcttacaacctaggggtgccactcactgtgattctgggcaagttgctcctcttctcaagccgcagcttcctaagataaaaaagtgacatttctagaatgttccagcctcacagtgctgtattctcacagggcagtctattaagtcatcaaactccctttcctcctctggcaaggaggacagaaagccaccttcctgtcaaccctagatcatagtacttagagctcgtagaagagtctgccaggaagttaggacctcagactatgacgtggtcaattgttaaaacattttatttgatttttaaaaactcagaaataatatatgatttttatattaatgctataaagtatttaatgttgtccaagtgctttctcttctgatttgggaagcagaggttaagagcatgggctcaagaggcagaggcctcgttaccctgggcaaacttcttatctgtgcctatttctccacctgtaaaatggagataataacagcacctcagaagataagtttgaggggtttaaaatctgtgcctgacacacagtaagagctcagtaagaactcagtaaacagtatctctcagtagtatccgaatttcataggaatctgatgacctccctttttatagcccctgacaggatccctgggatctgggagtcctcactcatgaacactttagacagaatgaatgaaacaggaagaaagtgagccacagagaggtcacgggacagctggcttgtgtcagtggcaaaacttgaacatcgatatcgtggtttacctctttacctggggctgtctccttttcggtctatgtaaacctacaggcagttaagagcagcagttttcaatgtggggagttggaggagaggtcacaaaatccatttagtggttcatgagcaacatagcaacgaaatctactaaaataggagatagagaggggctcatcagagtaagatgtatttcttacatggctcaaagtcaaaacagtttggaaaacattgagcttgggcatctgcctcaagcaaacgcaagtccgaatcctgatgctttaagctactgaaaggtgtctgacactaagtgaaaatgagcaagatggtaatgaggatgacgatgatacagatactgttgactgtggtgttgatgatgatggaggatagctagcatgtattgagtgcttgggaggcaccagacactcttctaaatattgactcgtcagtcttcactacaacttaatgggatgggtgctggcattagttccatttttcagaagaggaagctgagtcacagagatggtaagtgatcgagatacccaagatcataaagctctggctccagagtccattccttaactacagtgccatcctgcttcactagtaggttcaataagtataacctgtttttgttatgatttaagacaagggcaagactaaaggaggcatcagtgaccctggccttggacactcccagacccccatgttgattgttctgtgctactgggagttgggggtggggtggcatggagacacagcgaggcttacctaatctctagtttgcctggggaatgtgagaggagaaggtcccaaatggctttaggcaggcaccagaaagaggaaaaatgaaaaccatgttaaagataaatcgagccgttcttaaaagttagaaagtagacttaattaggaccagctctccctgtccaaaaccacaaaagttaaaatgggaaaatatttccagaaatgcctattatgtgttgttaaaaaaatatctagagtaaaatatatgttttattttatacatgcctccagctaaaaattatgcctttactcactcacacagaagatgagaatgcaaacccaaatctagacagcctcgaatcaaatttaggttgcttgctagtgttgcagttttctatcggccagatcttactcaagctcctcaaaggagaaaagaggggaaaagatgaaaaagacaagagaggggtggggagagagcctttcctgacaggctgtggcatgtcagcgtttgctcctattccattaactggccttctctgtcgtcttgccttggtgcccatgacggcacatctttcatcactgcgtctgctgtcctcctctgaactcatggaagggccacatgtaattagatgaggtcagctgggggtgggggaggagagccaggctcgctgctcctaaacaggacctccaaaaaatcagatacagggtcgctcctgttcactgcctcatcagcaaggtcattaattggcccagatttctcagagagcatttaaagatgattcatcttaggaaaggctaacccctgtcttccaaatgcttggcctttttttttttttttcttcttctttttaactactgtgtaggaaaacgtctttaacttgattacgttttgaaaagtgatttctccatgacaaatcagtaccctttttgaaaacgtaccttgtccccagagacgttcttgctcggcatttcagcgggtctccaggagttcacgctctgacccccgggattcatcagtatcgccaaggctcttttgttattgtcctgaagtttacacgagctccccaaattaaagatgaaggtcatttatttattgttgttagcctgtctcccattgtacatgagcagttgggtgttttattcttcagaagctctgttttcgaggtgtaagttcaatatggaggctccactgcacgctgaggatgcaagatgtccagattacatgataacccagggaagaactaacacacttttcttttatcattttagttgagaaatgctatggtgaatcgaaagacggggaagttttccatggaggtgaagaagacagtggacaaaggggtacatttttctcaaacatttttgctgcttaatttaaaacaaaccactgtgaaaaattagctttgaaagctatatctggaataaatatctttcgctgagatcatttttctcttgtctttacttatctcaaacaagattcatgtagtactgttaacctgatcatagtgtgtccatttatttttatttatttctgaagacgtcacttagcagactaaccatgttttcttttctctacgacttttttttttttttcaatctagaaacgggttttggtgatgacaaatgactactattatacagacatcaagggtactcctttcaggtagagctgaccataatacatggacattccatcagacccatcagttgtgtttgtacaaaacctgctgacactctcagagctcatcatctgaagataaccaaacaccctgccaaaaggctggaaagagtgaggaaggggcttttcccaggctgcttttgttttccagaagggggggagatggttcaggctcacctaggagaactcactcaatctgccatggctttgcatctcattgtcaagcaaatatgctttgggggttcccgctaagggtgaagacaagtgcagagggttaccagggtccttaactattgaacttgctgctttgtgagttccatttcaccttttatttccatgaccaaaaaaacaatccttcaaacctggaggtggcatatccattcctacatgttgtgcctctgtttccatttctctgaactgtccttgtgtgcttgtctacttttgaatcctgttgtttctctttgtaacagtcctgaaaaatggctttgcctcattggctgctttcagatgtgtatgtagcattctaaagtttcccactactattaacttagtgttgtaattcattttgtaaaaaattatttcagtaagcctgcttcatattcctgaactggcgtctcagagctaaggagagaaggagtttactgactgtagaataatctgaaaaataaattctagcattgttgtcctaaactgccaaggatcatgggtggattccatgtggaaccaggagcaaataaggaccacatgagctgctaagtgggtttgccaaatagtctctctaacgtaagggactatgttttaaaaacatagtctcttgcttttgataaaaacggaatggatcttaaatcaagccagtgagtgtgaaaaacctattagactagggagaggattgggcaaagaagcctgcaacacagtaatgtggttacactcatgtagtagtggaagtttttgtttttgcccttgagcaggggtcaatttcccgagtcccaaagtctaggggctggagagacccatctctggctgaatgcaggacaagggtgtataaagagcagggctcatggtccttgggagggcatctgagagaagggcttgctggaagggcgagcagtttgccacaactctgaaaacacaaagagtagccaattgctgctggcatttctgatcagaagttactttgaagcagctgattgaacctaagaaaaaccaacaccagtgataatcagtggggttttgaaagtaaacagttggaaaaattgttgacagatcataaaatggaaatgtgaaaaatggaaaattaaaaaatgttagcccacaagtctattcgagtcgatgccagggatttcaagatttgctttgtctctctgcacagtttaggtgtggcgctttccagaggtcatgggaaatatttcttccgagggaatgtaaccatcgaagaaggtaagatactgcctggctcgtcttatcctttggtgtgggaggaaagctcgggagctagctactgagttagctgaagaacttgttcatctgtccgcacctgtgaccagtcccttggacattccactcaaacgaatgcctacttgataattcttaatacctttcttcttccctggtgtgcctagatttcagaatgacaggagttccgattcatggttgtgatttaatttacttatattctactttcatccacaaagctgttgactatgagtaactcacagtcaacagcattatggatgaaagcagagtatcagtaaataggaatcatccctcaagtatattcttctcatacataaaaatcagtacttgggagaaatacaaatttatgaaataactcatgcccaggggaaaccatgaaaacagagatatgagagccttagtctctcctacacagttgagccacgtatttcacttgtgtttcatggcagccctggcccaaagggaaatgtgaccatttaaatgatttacataggtcagagggagtaagtagcaccttgaagttcccagaccctcttatcttcataaagcacagaggcacagtaaactctcagtaaacaggagcagttgttatagctctttaaattttaaaattgctgtcacatgtgctatccttttcatctgccagctccctagtagttcagagaggttacctgtcccagcattaggagctcacaggggtggtggacattgtttctgaagggcaccactccctgagtggccttgagtgactcacttgcaggtcattaggttttgcatgtccacagaggaggagtgggcccagaacagtagtctttctggatgtctttagggaggacagccaggaatgggaaggtcaattataagcaaagttttaattggtcggaactgattacacatgtatgtggtgagtttccagaagctgggccatccatggcgccctcagatgatgccacagggcgtgaggaaggagatggatgttccctgagacgccaaacccctagatagcctctgatttactgccagtggtccctgcccgtgttgtttcagggatgttggtttgtgcttcccaagtgcttgtgagatcgtataggggcagaaaggagagtagagaggctcactgtgagctgggcacaacccagagtgtgcccaccaaagagctaaccatgtggtctctcttcccagagacatgccagagaacacaggcaactctgtgacttgagcaagacactctgcaggatgtgttttcaggatcatgttttcacttctagaattttctgcctctgtgggccatgttggctctgtggacatcactgcccatgaagccagaaaattcatgtctaagccatgtgaggtcacgctgaagaaacaactcatggtcagaacaataggagaggttattaagagatattaactgcctctcatgcgtctgctcccttggtcaatcctcaatacatgggcctgtccctcccttcctctctctctctctctcacacacacatacatacatacatgcatggagacacagatacacacagttgttttgcattgtcttttggattctttttcagtcactatcttcctgtatgttccacagctgtgaggctaagcagtcacagagaatttcagagctaactgtaaccactgtgcaaaaaattagctcaaatcctcagcaagggggagagtggctgcttatccacccaaatgaggtcatatcttcctctctctgttggtcctctgtaaataaaaagactgacaatcctgccagctttgctgagtaatagaacttaagaaagctgcttccccttgggccaaatagtagaggatcttgtcatctctctaggagccgtggtgtattattgttctcttctgttcttggagagggaaggagttccttggggttggcaaccatacttctataggatcttcaataaggaataactgcctacagaatgtgggaattttccacatgctttgccagtgccagagattacaaaggcggcaaataggtagcttttgctaaaaaatataaaaagtcattaccaagattgaaggtgtgggctataattctacctgctgaaattgtttctcttatgaatcttttaatctttttcaacactttgtatctttttgtgtgtgtgtgtgatggagtcttgctctgttgctgaggctggagtgcaatggtgtgatctcagctcactgcagcctccaccatctcctgggttcaggtgattctcctgcctcagcctcctgagtagctgggattacaggagcatgccaccacgcccagctaatttttgtatttttagtagagacagggtttcaccatgttggttagactggtctcgaactcctgacctcgttatctgccttcctcggcctccgaaagtgctggggttacaggtgtgagccaccgcgcctggccactttgtatcttttatatgtattgcacatgataattgttcaacaaattagagcttatgtcattattgtcaacagttccagtcatcagtggatatgatttttatcagaaggaccaatgtcagaggtgagagaattagaaagcaattaaatttccttggtgccctaggaacccagagaagaagcagtcaaaaagatcttcccgatagatctcatcttttctgagtgtcatttataggtcctgtgaaatagagccagagatgattttgtaaatgaggttgggaggatgggaactgcaactagaaaaagacttgacactctaaacccagttttctgggaaggtacagtcccttctcagggcctttgcacttgttattccttctgccatgagcacccttcctgccacctacatgactcttcctttcctcattcaggtcactttctcagtgaagcctttcctgacctccatagttacaatggaatctctctctctctctctctctctcctctctctcccttcaaccctccttatctcttggtcctccctgttcttgttccatgttctcttttcctttttagcccttgctaccatctgatattctctaaagttaaattttaatataatttactatctcttttctgccactagaaattaaatacaatgaaggcagtaattttcgttttgttttttcactgctatattctcagggcctagaatcatacctggcatatagcagatgctcagtaaaagtatggaagaaaggaaggaatgggaggagggcaaaaggaaggaaggaaagttgtttggttgggaagaaggaaaggaaaaaaagaagaaaggctgcacagatagatggattgtactagggactaatccctgtcccatttaactgttttctggcacttgtgagctatgcagtattacttgtatctcatggtagatataactcaaagagctgacatgacatccccaaggtcattcagcctgtaggtgttggagcgtgggtatgcccacttggatcatatgcaatgatgttcattctaatgtattctctactttctgtaaaatcaagcagaattgtgtgataggtctagtattttgctacttcttttatagatttgtgtttgagatggaaactggagtcctgagtgcagtaagatactatcagtcatttaagaaactaacttcccaaaacaggctataagcatcatgggagttcccgaggtcatcattcagaagtgtatgtctgctgataacccattaagatcaagccatgtgaaagtgcaatgaaacagttatccttgcagagttaggatggtctggaaccttctattaaaactcccagattccatgcaagccccagctcccctagtttccttcccaggcggatgaccgttttcacttaggatcctgtaacaactagcaatctttgctgctcaaaaacagttgagtattgacgacttcatattgttcaacctatgatttcaccctcacaaccacacatcaattagggactactattcctgcttttcacatgaagaaactgacgtttagagaagtaaaataacctgttgacatcacacaggaggtcagtggcctagcccggttcccaacttagactaaatggagcaccagagagagtgtttctaaagtcctgttaagcttctccctccggactcatttgtgtatcctctatcttcaaggggttaaggttttcctgggatgaacagccagggaaggtggcagtgctgggctgagtgaggtagagatggggagagagtcctgcctggaagggaactcgtttattttcctcagaaaataaacctgctgctccaaggcaggtcccttagggttgatgtctacccttaacccaccccgcagccctaccctagaatatttgaagcacacaggaggactgggggagtgatacttattcatgaaccccttctccttgacccccaggcctgcatgacttagaacatcccgatgtgtccttggcagatgaatggtaagaattaaaccatccctccttgaccatggcatccttcattgccctctttgattccacatggtttgtgctcccttgcccagttttcctgattccaaggcaaaggaagcagatgctgtaaatattgacatgctcttgttttgggccatgtcatgttcttaggtcctactgcaacactgacctacaccctgagcaccgccatctgtctcagttagaagcgattaagctctacctaaaaggcaaagaacctctgctccagtgtgagtatgctttcaaaagtgtgctgtgccttcaggggtgatggtggggaatgaactcaaaacattttttggcctcacttgttaagggaagctttgctttggcagagattatcagtcacatgaaatctaatcaaatatctgcttcctgtaggaacaggagaaagaatgtggattatggaaaattgtacagaatccccaatcctggtttagctgtttgcattgggctttgtccccttctgaaccatttagtcaagcaactgaataggatgaaaatgttacaactgggaagggactgtaaatatttgcatatctcccttattttgcaaatgagaaaccaaggctggaagtaggattgtgcctcattcaaggctatatctagatctcctggttctcccaagagtagggtcacgacggggacacgtagcctctcagtgtggtacatgctgagtgccctgcctaccaagcatccccttctaggggagttcagtgagtaggaaatctctcagctggtgcaaaagagggaagagcagtggcagccctggatgtccctcaaaagcaggaacagaccctatactctcacagtttgggcaggggagagccactaaaactgatcatgatatctgcccccacctctaacaagcatcatgtattcaatgacctgaaaagtgttttacatatctaatcctatgagaggtgtaaggagattatccagctactaaatgacatctccatagaatggatttactttttgggatatgccctggtggggaaaggatcagatggacatcctgtgagcccaatgtgtcattgtctttgactttttaaggacatatttaaaaaacaaaagtatagagacaatatgaataatacatttgtagtcaccatccagctttatgcagtcgtaatattttgccacacttactccaggtgctttttaaggaatgagacattatagataaagttgaagcccctgggtccctgctcagcctcgtttccctcccaaagagaatgaccttctgtatttgttcattattctcaataatttaatgctattcctacatatgtaggtatctataaacaatatgtagcattaattttattattttaaaatatatattaaactttatggtatattgtatgaattactatattataatacatacaatatgtgtataaagtatatatgtactacaacttgtgttttcacccattatatttttgaaatttgtgttgatcatttagctttaacgcatttatttgcattactatatagaattccactacataacttaatatattcattgtcttactgataagttatttctagctttcgcttttcagcaaagctcttttttttttttttgcccccagtcaaggtgaggactgtcctgtcccatgtgataattagttatcctcctctgcagagtgatttgaaaactctaggatgcctctcctagacttaccatgtcctctcattccttggcctcttccacagagctctaccaagagtccctttggatggcaacagacattctcctttaaaatgaaacaattcttggccgagcgtggtggctcatgcctgtaatcccagcactttgggaggctgattcaggcagatcatttgaggtcaggagtttgagactaacctggccaacatggtaaaaccccatctctactaaaaatacaaaaattagccaggtggtagtggcctgtgcctgtaatcccagctacttgggaggctgaggtaggagactggcttgagcctgagaggcagaggttgttgtgagctgagattgtactactgcactccagtctgggtgacagagtgagaccgtgtctcaaaaaaataaacaaataaataaaaataaataaaatgaaacaattcttaaaaagaaggaatcacaaaataagaatcccaggggttattaagttatggtatctctttcccatgtgacaacaggctgagaatttcagggtgctaaagaatttcagttttaggagaggacagagatggggatgatgacagccaagtgttcaaggagtactggcttctggtctccaaatctgggactcagcctgctggtccatggcaggaaccacgagatggggtgagaaagcaagaaactgaagtgtgagacacccaaggctctcagttgactaccttcttgcccaaatgctttggaggctcctgtgttgcaggcataccaggtgtcagaactgtttcatattttcaactagtgggaacttaactcataaagcaacatgccgcatgagaaagtagcctgcagatgctgcacaatgagcccatgagtgcctctcatgcccctcttccagccctgctgaagcatcctcttgtctgtccctcccaacaggtgataaagaattgatccaagaagtcctttttgacgcggtggtgagtgcccccattgaagcgtattggaccagcctggccctcaacaaatctgagtaagtggttgcacgtgtcctcgtttcatggccatttcctcaccaacactccgaaatatggttatggtttaaagaactaaactgttttaggaacctggtgttaaagttctttaattttcccccaagctccaaaccacaagagctagagcagattagcggctcgggcttggatggcaagctcctggctttgacatataatttgtttgagttttaacgttacatgaaatttggtacgctgaggtagggtgacacttccgagagagagggaggcggaagggaacttcgttgcctgcctcgccacagctctctctactttgcagtcttgggggagcttgggatctgggccaggttaggttgtgagtaggatggagaagtgagagctcagtttcatagggtgttagatataaccctgtggttttatttctgaagtggagggtggagggctgtggggaaggccgtggtagttgatatcaaagactaggatgagaactgctttagcagcttattattatttctttaccattattactttaagtagactattaaagattaaaaagaaaaggaagaaccattccttttcccttatattttcatgtgttacatgattcatttctctccacttttctgttcttccttagttcattccctcattgtatcttcccttctatcctgtttctctccatttttctattcaatagttcattccctcattgtatcttcccttccatcctgacattcattctgttctcattttcattcattcactcatcaagtcttgactgtgtgtctgttatgtgccagactctgagcgaggtgttggggaaatggagagaaaccacacagatagagcccttaacatcatggcacctgtggtatatagtgtgctgtattattaagaatcataactgctttgaaggaaaagtaaagacacataaagtgtaacagatctaaagtggaggaggaagatgggaactagttcaaggtttgggcagcattccaggaacagcatgtacaaaggccttgagatgagaaagcatttgacacattggaggaatttaaagaaggtggacacagctgacatatagaggatagcctggaagatgtcagaggatgaggctgcagaggggccgcatggctcaggaccttgggagtcaggttaaggattttggattttatactcagagcagtggaagatcactgaaggattttaagaaggggaagaaaatgatcagattttcattttacaaaaagatctctctattgctgtgtggagaacagagggtgatggggtaagaacaatagtaaaggttcgtacagttttcccagggattcatgacttggacccgggcagtgggcacagagagaagaggtccacttgtggcttgcttcagaggcaaggtctccaggacttgatgatgggtttgttgtggagggtagggaggttgagccatcaaggatcattcccaggtttatatcatgagctattgggcagacggtgctatttgctaacacgagagacactgggggaggatcaggtttagggctgggcatggccagtctctcttctagacatcgtgagctgaaaatgactgaaagtctcccaaatggagatgtcaggtaggctgtttagtatgcaaatctggagccccagagagactgccattttcattattaggggtgtctttgaactgcttgccttcatggcatggatcttatttcctgggaagctggcaacgaattgagcctttcctggggtttctttctctagtaaaccttgtagtgtttcttttcggctctcatgaaactcaaaatcttgagcaaaggttgctgattcattcctaacacatactaaagatttccaaaatggtaacttgctttgtagtccaccatctgtaactgattggacagcctggctttccaatttggtgtaggctacaagcagaaatgcattgttttggtttttattcagcccttaaatacttaaaggtagcatccaccattttgactttcatcaaagatcaagtaaccaaatgaccttactttgaagataacgtggagaatactttggatcaaattactagtagcatttaggacagagaaacaagctcaagaattggtgttctcttcatacatttattgtaggataaaattatgtgtttgtggaccaggcatggtggctcacacctgtaatcccagcactttgggaggccgaggtgggcagatcacaatggcaggagatcgagaccatcctggctaacacagtgaaacgctgtctctactaaaaatacaaaaaataagccaggcgtggtggtaggcgcctgtagtcccagctactcggggggctgaggcaggagaacggcatgaacccgggaggcggagcttgcagtgagccgagatagcgccattgcactccagcctgggtgacagagccagactccgtctcaaaaaaaaaaaaaaaaaaagaaaaagaaagaaaaaaaatattatgtgtttgtgaagaaaggccatttgctttttgcataggagaaatataccttgcaaatctcctaaagaacacgctcaagcatatagaatttgccttggaagttgaaacaaaatgatatttagtgaatttttacattagttttccttgccaaggccgttcttagagttcctatgtgtagcctcctacagagctattggaagaagccatttctttacacatctctttggggttggtggtgagaataaggcctgtggtctggtagaagtgataagctggggcccccacaactgtgtggatgtcaaaaccaattccaactacgtggaattccaggctgtgggatgctgcaaacttggttccatggctcagctgctttaatggcagattccacaaatgatctcaagaccaagaataaacttggtagctttaatgcaaaaagcgagtcctaagccctaactggctagtccttcccattcttagcctgatctctttgaacttgcacccagaaccttgaaataaagatgtgtgtatggttggaagtagatttttttcacatgctgcttttgttggcaggaagttcttcatttttcctgcaagtattactttgaaaacttttgtaagggatacaagttggcaatctgtgctcgtgtgtgtgtgtgtgtgtgtgtgtgtgtgtgtgtgtgtgtgtttctgtatcttcttttaaagtttaagtttcaaaactgctatttggtaaaaacattctgtgagtcttaaaatgcaatgtattatctgcttactgtctagaggcctccccctgacgtctgttgttctgtttcagaaattctgacaagggcgtggaggttgccttcctcggcactcgcacgggcctctccagaatcaacctgtttgtcggggctgagcagctcaccaatcagtaagtaggagggatcctctacaggggcccagggagcttctgaaatggaacattcaaagggaagcttatttcatttcttgattccactactggtagaaacataatttaggccaccccaggcctattgagatttttcctctctgttctaccatgcgggccccagcatgtgctttcacctgcctgttagcccttccaccaccctttgttcctcaggcttgttggcttctgtccactgtcctggagtcctctcccgccctgatgagtcatttcagaactctgggaggtggtgcggctgctgggggagccgccagagggaggaaacactcatctcgtaacaaatggcttcagggtgttcagctgttctgcagctatgctgaggaattcctgcctgtacaaaagtcactgttccaagtcctgtttgtttacattttactaataaacctctgcctctgtgcttagcctgaggggctgcagagctccacacccaggagtgggccctctggggatgctggggtttgacagtgtctccttggacttccaaagagacgtggatagatggtgggcagagagtttccaggtctagtacccagatgctaagcccctgcatcttcagagaaccacgggcccttaactcatcaaactggtgtttcaccagggctagtaggtagactgtgaagtcttttctgagtctgttaataagttttttctatttcttttctctgaagcaagagcgattgttaagacatggacaaatgggtcccaagattcagaaagttagagagtggtttgcaagtgtgtgtgtgtgagttcagaggttaccacagaacattatacccccaaccttcagggtacctggaggtgaataaccaagccacagagtagctgccaatttgagagggattggctcatcaggggtccaaggaggcggtgcttccttggagcttgacagtgctgtttgcctctgctaggtgaggccctgacacccaccatataaccttacaaaaccaagtctggtaaatgacagatcaatcaatgtttaggtattttaagagattggctttgaattctgttccaggactttgaccttcttgatactcacatttatcatctatgaagtttgattatagttgcaacttgatttttaacgacttttttaagcgtttttcccccagacaattgtttttccagagggcgagttcctgggaaggactagaggtgctgagatacacattgccttctcctgttaggatccagataggcaaggggagacaagggaattcattttctaatactcattgagaaagtctgctgctggcattgagactgaaacaagcaaagctgcaaaacagtaacaataaaacatgacaccttgctggtctgataactgtgttattgtgatggatttaaaagacaaaggaccacagtaaggatgctgggaggtgtacctggcttatctcacttgggtatcttcattctgtcctcctgaaaagtgagagcgatgatctcttttggttactgtgaagatcaaaaaaaattatggatgagctgggcacagtgactcatgcctgtaatcccagaactttgggaggccaaggcaggcagatcacttgaggtcaggagtttgagaccagcctggtcaacatggtgaaaccctgtctttactaaaaatacaaaaattagccgggcatggtggcacacacctgtaatcccagctactcaggaggctgaggtaggagaatcacttgaacccgggaggtgaaggctgtagtgagctgagattgtgtcactgcactccagcctgggcaacagagtgagactctgtctcaaaaaaactctttttttttttatggatggaaaatttctttgggaagctaaaaattcctacaactgtgtgttctattctttgtggcattacgtgacccacagagtgggtactcattgacaatttgaatggatgaaatctgtcttcaagaaactcctgtcattgcttcatatagaggcaccttgacatctattgtcttagggtcttacctgcctatcccctcccatcaaatggtatttgtcaagatccagctatttggatacactctctaagccaggcttagaaagtttttagcatttctgacttttggtttagtttttgcttttgactagggcatgaaaggcagagctttaagtattgggcagagaacttgataatataaagttgctaccctgcaattatctcatactatcatcagtctcctacactgagatttcatcccatacccccgccacctgcatttggaagtaggtcgattatactgaaacttggccgtcacccccaatagttataatacattctgtgccttcagtacgacttctcacatcacatgcatatagcatccagtgatgttagccttcacagcgtacagccttaagttaagaagatgaccactttacccctgccctttcaaccaccaagaacaaaagagctcttgggctttaagaatcccatatatttgttagagcctgttttcagtgtccataacactctttcacatatggtgttatgtaattctgatacaaccctggtaaagtgcagcgtttttattgttcccattttgtagatgagtaaatgggggtcggagactcaattactcactcagagtcacccagttcttcccagaatctagaccagcctgacacaccactgcaatagctcctagtatccaggaggagactttcaccttacccagaaggatctttcttcctgaagaacatttttgggattctgtaaaatcaggttgctccttcctgtttcctccagaattgctgcctagtagttggcagaggcctccagggtttcccggcaactcagtcctttcgcagtgacaccagggctaatggggatcaagtgctgcaggctcctgctggctgccctaggtgccagcactgtcccgggcagcagggcactggacacccagatgtgcagcattccagatctattgccagccacccccaaagcctgaatgtcactgccttaagtgaggaccacttcataccttctaaccaagccaccatctcatctaccatgactctggaaaaaggtcccctgtgggcatcattaacctgtgctgcatagacagggcacctcttagctgtaatgaccactgaacagacctgctgggagtgcgaacaccttctgctcagtcgtggctgcacctgtgacccagggtagagagtagcaatgcatcctgccatgggccaggcaacagaggctcctcctcacaccgtccaggtcaggtttatgaagaatttcatgtctagcgaaagaaatgaaaaggctaaaatttcagtattcctgaagcctgatgacttttagattaggaaacattaccactgaatacaagcagcacaaagaagagcttgtctaccaagatgagcctggaagtcctgatctccagcattctagatagcacaggggatctctgcactttctcagtcttgcacatgactccaaagttggccttagccttctgaatgagagaagagtgctttgtaaaaatttttcttttaaacacttttaatttctggagagtcattttgtcagtaagagtcaagatcaaatgcaagcagctatgctatgtcagaccgtttttgacctacaattacctagttctagtagcacaaaattttatagcagtattaacaaagtagagcacttatgaagacggccatagaaaggaatttaaacaaattgagaaattttatttttgaagatataggaaattgtgtttaatactggaagagctcttatctggatatgagattagatttttcttgtgatcattaagcatacaccaagcgcctgctgagagccaggccctggaaatattgggaggaggaaggtcccagaccttagaaaggagttaggacatgctagtacaagttacagggaggtagattccagagctatctaagaacctggagggtgtcctcgaagggcatgggcctcctctccaaaagtgggcactccatctttggtagaggtgaagggaaccctggttagacacaccctgcaactactgaatgctttcctgaactgggtgccaagttcaggaaaccaaccagttacaacttagcatgaaaatttctctccatggtccttgtgatccaactctctgctgcaaactgctgggttgaaagtggtgccatttctgcttcaactcatggccttttccctacctatatgttgtcccttgattggtctcccttccagaaaaatgtctgcagcagactgtggcctaaccaggcggtcatccccccaccgcctgagttgcaccgtatcagccaagatgaggcgcttcaggtgctggacagcacatgtgactctccagagggaatgtcaggtcaataatcatgcactgggacttgaatatgcttaaggctctgtgaagagtgcacaaatgtgaacaaatctcctgtcctcagagatcttgggaggtctggggaggggatatgatgattgtgcaggccaaaaaataaataaaaggctatatgaaagttaccaagattgtgggggcccagggtgtggcaaaagcttgcatgtgtttctgtggattcatggggtagatggtagatgaggcgcactttgaaaatgagtgtgattttgaaaggaagagatagaaagaagactgcacctagccttcccgatagacaagctctctgcgcagaaggcagggagtcagtggagggcggggatgcacacagggggcatgagcaggcctgtttgtccagcgaggaggcaggtgagggaagaaggtacaaagatctcagtgtgggctcacatttacttcctttgcacttcttctgagaagcgtgtttaccttctttacacttgctctaagaagaatgagatctacttaaggagttgattctcccaagggtatgagtatatgtgtgtgagtattaaagccagacaaagctttcttgtttagaggggacatccttgggttttctgataggatttctgtaggctttgtttgcttggcttcagactttaagacaattagttcactagatatacaaggaaaaatcattttacccactcagaatttgactcccagagctctgcaagatgtttttgagtaatctggggtgcacagtgttaagtgaggccccctctatactgagaaaggcaagttggggttctaaaagtgaacactggttttacctgatgaaggctgtcggggtgctccaggcccacctttactctgctgagtgatgcatgttcttctgattcttttccacttcaagggacttcctgaaagctggcgacaaggagaacatttttaacgcagaccatttccctctctggtaccgaagagccgctgagcagattccagggagcttcgtctactcgatcccattcagcactggtgggtgcccttgttggaggcgggctctgtctgtctggtccagtgggtctgggcattgtgtgcagggtgttggggagctgcctgaatgctgaaaggaaccaagttcaaccctcagagccagtgctgaatattgggtcagccctgaaccagtgaccagttccataagagtaatagcctcaaagaaaaggaaggtttttcctttaccaaattatgtaaatgtatttcaggaagcagggctgatgttttgcatcctatgggattttaatagaaacttgtcagtcagtttttttaaatgtagtcatggccccacttagagaaaattcaagcatcccttgccagaaccttcagtgagtcacatccctgcagaggtccactgttccccatttgaactgaattgatttaaactgatatgccggactaaggactgactttgtataaccatgtgctctcttgacaggagcctgcagttaccaatgacaggcatgtagccgattagtttttcagtcctaagagtttatgatatgatagtataaaaaattaaagtcacctgcctccaaaaagaactgaatgatgtcttatttccaccagttttggaagcaaaacatactggaaatgcttcagttttcctcgtattttttttttctcttgcctcatgcatctggtattttgggtgctcactctatactgcttattgcagaaacttgagagatgaaggaaacctagttctgtaaacttgggttgctctggaaagttcaatctgtagttatattttacatatatcagttcctttcatattaatcttctacaaatattcctaactcaatcctaagggaagttctccagggtttgtgcccaatccccctccctaaggcttggtgctttgtcatttccatgactgaaaatattttcagaaagggtgcttttgaaatttgtagaaagcaaagagtgctcttacaattggttgaatgggctcattaggaagacagtccctcatcaatggacatatttaaggagaggctgaatgttattgatgagattctttgctgcttgggatttcagactagattatctgttagattcttttcaggtctaaggttctttgggtctgtgctcctttgctgatagacctgtgtgtatgcctgcctgtagttgtgtgtgctttctcaaatgtaaatttccaggtgtccgaagctcgcttgcttgcttgcttgcttgctttcttccttccttcctttctttcttttttctttctttctttttctttttcttttttctttctttctttctttatctttcttttcttttcttttcttttcttttcttttcctctctctctctcttctccgccccaccccgtcttttttttttttgagacagagtcttgctccgtcacccaggttggagtgcagtggcatgatcttggctcattgcaacctctgccttctgggttcaagcgattctcctgcctcagcctcctcagtagctgggattacaggcacccgccaccatacccagctaatttttgtatttttagtagagttggggtttcaccatgttggccaggctggtctctaactgctgacctaaagtgatccaccctccttggcttcccaaagtgctgggaccatgcctggcctgaagctctttctttgtgcttgtctgcaccacactttgttgctgaaaatatcaagagacagtgaactttttcattctgctgcagacctatgaataataacattgtcttctgtcaagcaatctcttaagacttccttgtcacaatcctctaaagaaaaataatagaacttagcttgctgttcttctgattctggaatcatcgagttaactaaagctgttgttggattggtttttggtaactgggattttcaccaaactttcaatgtaatggtataatgaagtgagtttaccttgttcatgacaaagttacagatgacgtaacatcttaggacatttcataacccccttagagtccgggaaaatcttaaaaatcaccaactgcaagtctctgtggtggagctctctctgattttctctgctatgtgttgaatacctgtacaaactagaaaagaaactggtttttattgctgcttaaacttgggccaggagaaaatttctcattactttggtcctaagtgtattcatattcaggtttgacttttccctgcttctcaattcaattggatttcatccaactcactttcattgagcaccttttagcaggtgggcattggactaaattattaactccaggcattcagaatttgtgctcagtatcttttaattcgtggatattggaaccattgctggtaattgaaaatctcttaatactaatgccatattgttaccagaataataatagtttggagtgaagattatgctctagctctatccctgtttagaataattttgcccagaaaaactgggctcgaaattacaattttatagatcagtaaagatttaaccaatgaatcagagctaaagttgccaacttgtaaaataatttcaaagccctcatacagctcttcatggttatatttagacaggcagtgtaaatatgaccactgacacaagtaaacactgcaatttgaaaccacagattaccaaaaaatgtggtccctcgatggtggtcaatggtttcgatgtgaagaggctggatgttccccagtgcactggtggtcataactcaactcgccaattccttcagctgggaggactcgcagcactgcactcatggcctggcagcgtaggcagagcatccacacctcagaggactctggggcctgggaccaagccccagaacaatttgcagaattggtgactgtagaccgatatgattactctcttaacgtgtacactgtaattatcttcatttttgttgtggtgttttttcttttcacaggaccagtcaataaaagcaatgtggtgacagcaagtacatccatccagctcctggatgaacggaaatctcctgtggtggcaggtaaataattgattgaatccatgaagacaaagtaagcatggcgcccattcatccggccagtgggctacttctgtgaggcacgcttatcctccaaaaaggttttcaaaggagaaaacaattttaaattacttccttctcagcttggtgtcatctccttcaaaccaagactctgacagctggtggtggttgatgtgaaaacagaaaactttcccagcgtttctatccttaaactctgagccagtaagaaattgtcagtacttgccgaggagaatttcttgatggtaggtagcatgttcattcaaagtaaactccagatctccagcttctgtgtcattaggatgacagtgggcatacaaggaaattgcaggtttgttttaggcaaacacaaactgaaatgtgcccttctccagagagactgagattttcatccccctaatccccctggggaattagagttagctgtatctgcaggtgctgtgtttgggaccaggggaaagccaaaatattatatgactgagagtcttgaattgtcaaagaagtcccgtttctggctttttccatttctctcactttttaggagtgtcagcagctgtctgtggatggctaggggctttcattggtggcatttggcctaaagggctggcaactaccaaaaagccctctttgaagacagatgctgacataaaaacaaggcccgagggtgtgtctggcacatggtttattctgatcactttggagccattggttgatgggtgggtgatatgctccaagcaccatcctggtattggctgggtttactaaagagagcgatttttgttttccagcagtctccctcaataagttgtactttagggtgacttaacatccacttctgtgtcttcacacactgaatatttgtgggaaggagtataaatggagcagatggaggagacctgtttgaagtggttgttctttggcgaggaaatactgcttttttccccccactttatttcttacttggcctgtgtataattgtattagtagggttgaaagatctgggggtagttgccctggttattcctgagttactgggtgtgacaaggatgacagccttatgtatctgacctgtggctcatcttgaactaagcagacctattcttaatcagccaggagatatgggctctgaggattcacagttgctgtcttcaaattttgtcacttaatgtctcatgttccttgaggaaagtgggagacgggatcatttaactcaacaagatttacttatgcttaaaggaggtcaggcttgcttacctccaggctggtccagcgagctaattctgaaggcatgttgtctcccgggagctgaggccacatgcagcagctgtcagtgacatggtctggccagaatatctggttgtctgtttgaaatttctttttaaaaccctttctttgggtttctagtttagtcatcatgaaggatgagccctaaggtcactgtgcctgtcccagccacctctgtccaagtttacaaactatgctcacatgtttccaaatgccttacatttcataaatgcctgtttggctgagtataggtgaaacgtggtctgagcctgaacactgtgtatccagtctagagaagaacgtgcactttccaaatgctatgccagtctattgtcgagttgcatcgctggccatagaccacaggcaggtcacgagacacagtttggtccaccctgagtgggtggagaaggcaccctcctatttactgcttctctgtgtatgccaaatggcccccattttcagaagataattacagagcaaggccaagaagcaaggtcatttaaagaaccgtatttagtccttaccttttagaattggtgactgttaccctttttcaaactttggtagacgtaagataaaacagaattgcttggttttgatgttgaagactgctgtggatgcagccccacgaaggcagtgacctcaagaagacctctctgtctccaaaaatagagcggcctcttcagcaccccctccccaagttttcctgactctgactcaaccatcatatcactgtgtgattaggtttggtaactttcctctgtgtattttcctcaaattaagtagacactgtttaccactctaaaattaaaaaggccattttaattggggaagaagccttgttttggcagatgaagatgaatatgtgagcaggcttttctcccatcagtgtgccccaacagcagatgggagacagccgactggcaggaatgttaggtctcaatgaaatccttgtgttaaagtggaactcttctgaaagaagaggtgtacaactatgcaaataattatcaaggactccttggaaaggccagcttcgctcccaggcctgacctggtcatctcatgttcattggctatatatgtctggggtagaaagaggtttttttgtttcattttcttgttttttgttttattctcttctttctcttttgtgtgttttcttttttaaacaaaaacatttagatactcatctgtcaatgacacctttgaagaaaggccagtcagactgggcaagattccatttgtacgccagccttggtgcataaatgggccccatccatcttcccggcctatgacattgcttacagtccttctcttgagaagcctgccaactctccagctgccaccagtgtgctgcattttcttaattgctttcccactgcacaggaagaagtggtgggactctccctttggcctaccaagtctcatcctagccctggaaccttctgttgtgtcaggtccctcatccattgcattgttgtcactggaaatgcagatcttggactgtaaggtccacgcagtttgtcattcactctataacttgctaaatgtgtggtcttgggtctctaaagttctatctaaaataggcttgggattattacctcccttgccttcctgtgtgtcaattcagggataaaatgagaaaacaaacaagaaaattcttggataagagagaagaataaaaatgctagagtttagcataacccgtttttatctaaaagttggtggcatattcattcattcaataaataaatatttcctgagcctctgcttttgccaggcactctagctataaataaataataaccagtgtcttaatccattttgttttgttataacagaataccacagaatgagtaatttttttttatttaactttattttaagttcaggggtacacgtgcacgtttgttacataggtaaactgtgttatgggggcttgttgtacagattattttattgcacaggtattaagcctggtacccattagttatttttcctgatcctctccctcctcccaccctccaccctccattaggtcctagtgtgtgttgttcccctctctgtgtccatgtgttctcatcatttagctcccacgtataagtgagaacatgcggtatttggttttctgttcctgcattagtttgctaaggataatggcctgcaattccatctgtgttcctgcaaaggacctgatctcattctttttttatggctgcatagtattccatggtgtatatgtaccacattttctttatccagtctatcattgatgggcatttaggttgattccatgtctttgctattgtgaatagtgctgcagaaaacatacacttggatgtgtctttatgatagaatgatttatattccttcgggtatatacccagaaatgggattgctgagtaggatggtagttctgtttccagctctttaaggaatcgcaacactgttttctacaatggctgaactaatttacactcccaccaacagtgtataagcactcctttttctctccaacttcaccagcatctgttattttttgactttttaataatagccattctgactggtgtgagatgatatctcattgtggttttgatttgcatttatctaatgatcagtgatgttgagctttttttcatatgcttgtgagctgcatgtatgtcttcttctgagaagtgtctattcatgtcctttgcccactttttaatggggctatttgttttctcttgtaaatttgtttaagttccttatagatactggacattagacttttatcagatgcttagtttgcaaaaattttctcccacagaatgggtaatttatacagaaaataaatttatttcttacagttctgcaggctgcaaaccccaagatccaggtgcccacatctggcaagagccttcgtgctgtgtcatgttatgacagagggcagaaggtagaagggcaagagagcacacacaagagaagagaaagggcaaaacctattttgccttaacttacttattgttgacttgagttttataaattacgctgatcgtggtggtgattctttactttgttctccctggagagacctggcccactagtccagcagtcataggcaccgcatctaccatatcagggtagaaatgacctggtacaaagaaatacagggaggcagaattgaagcaagatggaaggtgtggccctgcaggagacttcttcccctcctcaaatcgtctgtctgacttccctgtttatcttctagaccctccctctgacaaatacaagatactcaatcccaatatttgttaacaatttcagacttctagagatgtgtaaaatattaaataatgaaatctgaattatgtgcacttgctttaaagtgtaccttttaacataccaaaatctaaaattgctcctaaaaatgtttcattttgatttcttagatagttttgaactctttaagggcaaagacccaattatctttttattcccagtgccaagtacaagggctaacatacggtccatatgggagcgatactggataaatacatgattcaaggaagacgggcttcattttcaccttctttatgtaggtacatatttattgaccagatagtggaaacatagtacttgactaaaactctaagacagataatcactcagtagctaaaactccagtccatactatagtaatatgatattgatcaatatgaatattttaaggaatagaaaattgttttgtgtcccatcccaaaagcaaccttgttggaccagtagttatctctgcatcagtagatgtcttttctgaggtccgggcatctaaggtgatgcttagaatagctaatctgatcacatcagcagataaaaaggagtatagacaccagagacattggtttcttatagaaactgctctttttaaacagctttattgaggtaggatttatatatctttttaaattataaaattcaatgaattttagtaagtttgggagttgatttgcaagaaacacagaacactttagatctgttactggagaaatttgaaaatgtgggttatgtggtctcatttgcataactcagggcagtgtaatgaaggggaagatcccatttaaccagctaattaggaaagggattgattaacatcagtgatcattaactgttgccaagtatgtggtatttaatctgaatgcagtatttactatgggcccttcattagagttaggtgaataatgctggcaaaatgttctaggcaaaaatttaacttgtgaacattcctttggtgggatctcacatatttggtatgtaggagttaactagtatgtcagaaagtgtgtatcaagtctgcctggataaacctctagtttttaaaatctgagcaaaggaactgttttattttggcaaaaatgaaaacttactgattaaaccagtagtttccaaccgggggtgattttgccaccaggggacatttggcaccatcaaaaaacatttctgattggcactactggttaggaggatgctactggcatctagtgggtagaggtcaggaatggtgctaaacatcttgcaaagcgcaggacagcctccacaacaaagaattatgtggttcacatgtcagtagtgctgagattgagaactgttgggttaaactgacaggtaaacttcaactcagtgctttcaaattcagtgtttttccttatagactaacaatcttgattcatttctttatttttaattaactcattcaataaatatatatattgcacctacagtgttcctagcgctggggatacagctgtgaacaagtaccccagaaggcactgtggagggtgtcaggcgattgtcaattgatgacaagggcactgttggcatcgatgtccagagactgagatgacagcttcccaatgaagaattgttccacacaaatgctgcagcaacctctgagaatgctgagcatggccaagttgctgccaatggagagcttccatttgtgtggcagatacacacaagtattgcaggaatgagagacaggaagggaaggaagggaagaagtgaaagggagggagggaggaagaaggaaggaaggaaggattgatttctagtagtggtaaatactctctagaaatggagtaggattaagagatgaaatgtggttggcagtggcaaaggggagaggaagtgcgcagccatgtgcacatgggtatgtggtggggcaatgcctttccaggttgggggtggtttgagaaggcctccctgatgaggtgacatgaatggaggtctgaatcatgagacgcagtctgcagtcatcatgcaaagatatacaggaagagtatatcccatatacaatgggaactaatgcctccagtaacctgcaatgagattcctcatccatgtgtccatattccacgtgggtgctgtgagacctgaatgagtctcttgggttttgggggtagttaccaggttctacaaccagagctgatgagtaggtgggtagctgacccagggaaagtgggcaacccaaggcaagtctttgctctgaatgtcaactatgagatgggactttttatatgtttgacatttttattaagctaacaaatgagtactatgcagggacagaagcaggtctaagccagtaggactgacaacagcaaactttatagaaatgggttagtgatgtagctataggtcacactttatttaaagtctacagcagagtttgagagtgagagctggacattagagcagctgctctgcataccacacagtagccagtgacaagggcatgttgaggattattgccccaggaataaaaatagcccagagttttgagaaactggatcctctgtgctcactctccaggacacttgctcccaagagttactgtccctttctaaactcctcaaaagccccaacgcgccctccactcaaaaatgagcagcagaattttggggtgacacatcctcttacctgcttgtgtgttctaaatcagcaagttaagccacttcttttagaggtcatggtgggatgtggacataaaagacagtgtgaactgagtatttatgagtgagcacaggccatccccttccccaggcctcacccctgtgccttccttttcacatgtgtaagaggaggttgtttggtgcagaggttggatctctaacagcctcatttttaaaaggtggacatttattttaccaccagagaaaagggaaggaattaaccaatactggaatatgtcttagacccagattcagtcttgcgtttgggggagtgtctgattcctgttgagagaaataagtttttatgtatataaagtttttggtaaatgcttacatctgggtgggtaataatcattagctgctaaattattattgtcgccctcttcattaagaattaccatatgttacgcccactgctgctcactagtcagtgctgtttcctgtattatgttattttttctgaaaacttgcatatcagaagattatattaataatatcttgatatgttttgtattaaaactttgaaactcacactttcacatacctgtgcctcagagctgaggttcgcaaactacagctctaggaaaccactcgtgtgctttctctatggatttgtctatttttggacattccagataaatggaatcatgtaatatgtgcccttttgtgacaagcttccttcatttaacataatgtttttatgatccatctacattgtagcctgtatcagtacttcatttttaaattgccatataatattcccttgtatggatagacaacatttagcacatccattcataagttgatggatgcttttttagctgttagtaatgttgatatgagcatccatgtacatgtttttgtgcagacctatgtttttatagtctcttgggtacatacctaaaagtagaattgttgggtcatatggtaactctgtttggtatttggaagaactgcaaaactgttttccaaagtggctgcaccattttacaacaccaccagcaacatatgaacattccaatttttctacatcctttctaatactgtctgtcttttttattttagccatcctagtgggtgtgaagtgatttctatttccctaatgacttagcatcttttcgtgtgcttacttgccatttgtatattttctttagagaaaggtctattcagatcctttgcccatatttaaattaaattaggttgtcttcatattgttgagctgtaagagttgttcatatattctggatataaataccttgtcaggccgggtgtggtggctcatgcctgtaatcccaatgctttgggaggctgagtcaggtagattgcttgaacctaggagttcaagaccagcctgggcaacatggtgaaacaccacctctacaaaaaaatacagaaattagctgggcaggctggcaggcacctgtagtcccagttattcaggaggctgaggtgggaggatagcttgagccaggaaggtcaaggctgcagtgagccgagatcatgccattgtgctccagcctgggtgacagagtgagaccctgtctcaaaacaaaagagaaaaagcaaaaaatcttgtgagctctccactgcctgtttttgtagaaaaagttgtattgaaatgcagccatgcccatattgtctgtgaataccttcttgctaaaatggcagagctgagtagatggaggggtagagaccatagaaactgcaaagccaaaaatatccactacctgctccttcacagaaaaagcttgccaaacccaacttcacatgaaaatatgtcacatattctatttaaaagaacaacgaaaaaggctgatttgttcactcacctatttaaacatgtttctataaaaatgaagtagatatttaaatcagaggttatgtaagtggatgccgaagacagagctttgtgtatcagaggttgtgcatcggtagtgcctaatgtttttgtctgtgtggttacacagaaattccaatcaaagatcctaagctttctaaaaatatatgttttcattgtaagtcaagacagtgatttagttaatcttcactctagcttataaatctctgaacagtgcaatcagcataatgcttggtagaacattgaaaatgccctcacatgctttggtggaaaacagtttatgggatttttttttttttccaacatggctcatgagagatttggggatttatttaaccgcctttatccaggcaaatctcctagtgaccttgttgggattttgatctcagttaagactagaatatatgtgactcatgctaagtaaagggcccacagaggatagatgagctgacatgaatttccctcccttgggaaaaaagggacgggcatgagcagaatctgcagcagaagagtccaagcttgtccaacctgcagcccatgggctgtgcagcttcaaatgcagctcaacacaaattcataaactttcttaaaacattatgagattttttttgtgatttttttttttttttttttttagctcatcagctatcattagtgttaatatattttgtgtgcaacacaggtggagaaccctggggccctgcaacatttacaagtcagggagatgagtgaatcagcaaatgagacctaggagggttggacagtgaggtcggctaagaaccaagtaaagggagacttcaaggagaaagtgatcagcgtggtgaagaagacaattcttcttcttccagtgtggcccacggaagccaaaagattggacatccctgcctaaaccctttgacttgactgaaagtccagtacatggactttcttgcctgaggaaaatgctttgatcagtgtctggtgggaaagggacagtgctgatcaaaggctttttattcccaatgtctcccaaagtttgcacttaccaagaactcctgggttctcttctgggtgagaagatgtgcaggatgttaggatcaatgcctgaatgtcatggtcacctcaaggccaaagtacacaattatacatgacacagctcaggcagatggtagtaggtaattgtctttcaaaataaaatttcagaatgaaaacatcgtgtatggtcatagtatatgctttaccattcttccaccaacttccagattttatgatatagtcaggtttttaagtcaaaagtattctgttacattattttatttgtgtgatgcattactcattcttttatgctatatgctcctctgccttgctgttttccattttctctggaacccactccacaatgaaatattcctcatgaaggtcaccagtaatttcagtaacttccattgttcttttgtcgtggcctattagcagtgcttcaccatgttgatcactttctccttgaagtttccctttacttggttcttagctgacctcactgtccaaccctcctaggtctcgtttgctgattcactcatctccctaactagtaaatgttggagggccccagggttctccacctgtgctcctatttactctcaaggctttgaacactgttcataaactggtgattcccaagccacacttctcttacttgaccttacttgcctattcagtgtctctactctttccccaataggcctgtcaaattcattagatgccaggctgaagtcctgattgcattcacaccctccccctccaccctttctccatagccttgataatttaaaatccaactcaataattctcattttctagttagtccaaaacctttggagtgattcatttatttttttaaacaaagcatgtcatcttggataatattgaatgtactcaaaagtagacagaaaaaaatacaatgaaattccacgtatcttgtgcccaatcccagtagccatcaacccttggccactgtgtccttcaatttgccaatccacaaccacccctcccatattattttaaatcaaatcttagtcattacatcgtttcattcataaatacgtcagcctacatctttaaaagataaggacttctttggattttaatatagcaatacaattacctaaaaataattcctaaatctattacctagtcagaatgtaaattctagttgtctcaaaagtgtcatttattttttacaatttgtttgaatcaggatcttcttcctcttcttctttttctcttcttcctcttcctccccttccccctccccgcttctcctcctccccctccttctttgtcgtcttttttttttttttttttttttaaagagatgggggtcacacgtttttccccagactggtcttgaactcctgggctcgagtgatcctcctgcctcagcctcatgagcagctggaactacaggcatgtacccctgtgcctggctttgaatcaggatctggaagtcattcttgactctttccttttcctcctacctacaaccaatctgcctataaatcctgttatttctttcagttatgtacagagtctgaccacttctcagcacttccactgttccctcagtgggccgctccactttcatctctgccctggattgtcatagaagcagcagcttctaccgcttcccctgtcttctcccaaccttcacctcttcattttattcttcatatgagccacagaaatcatgttaaagataagtaatatcatgtcactcttctatccaaaactctctattgacttcccactttactcagagctaaaagccaaaattctcacagaggtccaggtattagttatcttatgccaaagcttaatgccttaaagctacagacattgtagctacagacatttactattgtacagtacctgtgagtcaggactctgggtgcagcttagctgagtcctctggctcaggatcttccatgaggctgaaatgaaagtgttgttgagggttgcggactcatctgaaggctcaacagaggaaatgctttcaccgtcactcatgagatcattagcaggattcagttagctccttgtggtttgttggccagagacctctcttacctccttgccacataggcttctccgtagggtagctcatagtgagctagtttactttgaataggacaagcaagagagagtgagcaagatagaagctggagttttttgtaacttaatcttggaatggatatcttattacttttcccatattctgtttgtttgaagcgagtcactaggtccagcccacagtcaaggagagagcatgagttccaggaggcaagaatcattgagagttatcctaaaagcacctgccacaacctgtaagtcctacatgatttgacccctattaccctctaatctcagctccttctacttcccttttgcccactcaaccacagccacactacctccttgttcttcagtcacaccaaccttgctgctacctcagggcctttgcacctgccatgccttttccatgggacatttttcctccagataccttcaccactggttccatcatttccttcaggtctctcctcaaatattttctcagcagggaccttccttatcaccacatgtaaaataaaaactcttcctcttccatatccccagcgttctctcctcttcacatctgcttgttcaccacctgatatgatttgtatttctttatcttctccctctgctagatgttaagtttcatgggacagatattttatatttcttgttcactcctttagccttaatacttggaaaaggagaacatcctcctatatgccacattgtagacggtcttcatctttaatgaatgaagacagtggggtctcaatgggaggtattgtagaagttaaatgtcctcagataccctacatacaggacagcatgattcctctctgatttgtttttaaactcagggtctcagtggaaggcatatcagcataggatgggctgtacagactattgctctcgtccttgacaccccactcatctgtttcaaggtcacacctctgctctgttttgttttgtgttgtttttttgagataggatctcactcggtcactcagactggagtgcagtgactggaatgaatcactgcagccttgatctcctgaactcaagcaatcctccctcctcaggctcctgtgtagctgggatcataggcatgtgccaccacatctaattaatttttgcattttttgtagaaacgggattttaccatgttgccaaggctgcacttctgctttagatagtagatattcctcctggagacttagctatccttgagcagtattcctaatttccgtggccctcgtaactttctcctcttctgtgtattaatgagtatttcaatgggaaatacttattggctagcatcttaatctagactctaaatttcccatttttctcaaataatttcaagagagtatgactgagtttcttcccctctcatttggagactgccttttccagcccagtagagccatagattatgaaagggttcttatttccccattttgccttggctccttcagccggcctcctggttttagtagtaccagagctctggcagtgtcctactggttggtggttgggtttctttgccctgccatgctttaaggtaagtgttggcagtgccaggaaaggatcctaactctgacttcttcgaacctgtcaggtcctgaaaagtgcctgggtgttggccttgggaagagttgcatccagattcccactccaccatttactagtggtgtgacgttgagcaaatgacctaagctgtctgtgtcttcgtatgtaatgtggcagtacaatacccacgtgttttggttactatgaggcttagagaaaattaagtattatgcttggaaaatacatggcacgaaattgggtgctcagtaaatgctgataatggtgttgtaattgcccttatccaaatacttagtataataatgtcatagttttgatattgtgattcaccactaaatgaacaaagaatggtgaggatcgtgttgtgttatctatgctaaccccatctcctgcaactgcatttataagtctgcagttaattctgtgcatgacttgtgtaatgttgctttcctttccatgcttccatttcttctgtaaaataaggacatggaactatatcagagtaacaaataggtttaatctcttatgtcaactccagttgatcagtaatggatacctggaaaacagattaaaaaaaaaaattatgaggccttgtctgggctcagcagataactttgtcatgatctattagcaatgtctgcaatggatagaaaggctggtggcagctattctgaaattctccaggcctggactaaatgctctctaagacccttctcagatccccagtcctctgatttgttatcaaggtcgtcttgatgggcctttgtagctggctgacatcctatcctgtccacccaaatgaatattcagtgtgattggagtaaaacgtagatatgagtagtccagttaagaatctgaaagggattatatatcagtaaaaataaataaaaattaaaataaaaaagaatctgaaagggaagtggttgattaggcagctgcttctctgaatggggtaggggtttctttgagactgcattgcaatttgagtctaaaaaataaagcattttaatcaaaagagcaaaaggatggttccctaaagtcatgcatgcagatcatagcccagcaatgccatgtggagttggaatataattttgtgtgggtttctgtcaatagcatttagcaatggatacagggatgggttttcccaaactggaaacagtaatttcctgacctgcaatagaaagttataggtttctaacggttgttggataattatgtgaatgtgtgctacagatagattattttagaaattagtttaaccacttcctttgatatttaggatctaagataaaggtgtcttgtttcaggggtacttggttaactcaagcaaggagatttgatttgcacagaccttcaggaagaaatctgtgtgtgcatcactttttagtcttgccatttttataaggaaaaatgaaacccttagtaatccactggcattttataatcttaagcaaaagattcttcctgtggggtcagggatatttgccttatttgtaaaagcttttcagatataaagttgattctaggtcttccttctccaaaatctctatggcagagtacattcttcatgccccctttttttatgcctcactacagacagctacaatatctgtgaatttatgatccctggcaaggcaaaaatcacccgtctgtagccatactgttctactaaatatgacgaaagaactatatttttagttttctcagaaacaatcaacactaaacgtgatttttgtccacagtgtaccctcagcaaggcttctatgacagaaggacatttttataagggaatctatgaatatgacagcagcaataaacagctgaaaataatctatgaggcgtttgcaaattacccctcatgagctgtagtggttgtgaaagataatttgtggttctcacagaataccctgcaaattgggtctttcatctgcaatgttttttacagttaaaacatttcatttctcatattaacaaatgataactctgcatttgttaatgtaaacaatttgatttatatttttttctgtgctgagaagctgttgacatttcagggtaagtaattattttcattgccaactgctgtttgtggtgactgtaggcaaaagatagaaatctgaatataagtatgcatcattttaatcattttccttaaagactgcccataaagcaggaagtctgtttgcctgagttatcatctgtacttagaaatctaaaaggatataagtgttgacaagcaaggattctagtcacgttcagggttttctgtggtggatcagaaactccctcatgtaatctctgtgggtagggggactgggttgacctccactgtcaccaaacctctggcagggcccagtgcacttgctgactgaaatcactgcattaaaacgaagcatgcgttattgacctcagtagctctcagctaatgtaatatccgttcaagtggctcatggggtgggtgtcaggattacacaagaacgccttgcactgtgtctggtacacggtacacggtgtgagctctggaaacatttggtgaaactgggacaaggtataaaaacgtataattcctttctcacactgccttcttggccaagcatcctcagtccagggccatggaaagaaaggttttttcacttggaaagtagtcactacgtccataaagaaggatattgagccatgtccactgagtggcccatggagaggaggtgccagggcctgggacagagctgatgggtcagcaggctttccttggggtctttctttgatctacaatttaaggtatttcagtttctttcgatattcagaaaaaaattaccatcgaaatttaaactttgtcccctagaaaaatcatctagcaaaattgctgctccagaaaggtggtccatctttagcctctgggtgtgtggggcccacactagctatgaagcaccatggcaggtgtagattgtctctgtgattattagaggtgcatccgtgtgagacctgcacagtaggaagtgataggttcacccgtttccctgcatctatcccatacacatgtgaaccttccattcacatttcagttagagaatggactactgatttaggatccaaaccaatcattacatggcctgaaggagtgaatgtagagccagtaccctgagtagcaaatgtgttttatcctttgaaccaactccagttgattagttctggttgcctacagtgctgtcttaaggcatctgtggtgctgagctaggaagagtgctgagattgattagcaatgtctgtcatggcctctggagggacagctggccctatatttgccattctctgcttttaacatgtccataacttctctgtcctctcttcttgtgtaaaatgattttaatactaacaggtgactgtgagcatcatgagagagaacaggtagattccactttaagaaaacctagcatgagaaaatgcaaaatttacaaaatgcataaatctggagccaattatttctattacagaaagattccatgaaaggttcctttaaatagccagctcccctactgcattaaaatgatgattcaatttacaaaaattcactttgcatgcaactcttcaagaccatgtctgtggagtaaagccagccacacctgattttttaaaaccatggcctaaataacattgaggatagctgccgccacctatcttgagtctcttggtaattcccactctctgcagtcttccttcttactcctatcccagtgtggggagtagacaatctgggtggtggacaacagctgctggcttccaccctgacacggctgcatttcattagtgggtaaactgattgctcagagtatgtttatgtgtgggtgtggttgtacaactctatgcactctgtgcgctatgtatgcagatacagatacacaaaagtcattatctcgctctcagcccaacctaaattcattcctgctgtaagagttataaatggaaggttccaatcccttggtggatatggccttttggtaatatctgccccaaattctggctccccatcctctttgtgtttgtttatatgttatttacccttgcatcagaaaacttccccagactcagggcctgagtcctattatccggacatggaatcttcttcttcctctgaggcctagaaagccccaaatggttttctgatttagaaaatgaaatagactttgactcttgtggcaagctatgaaattcccaaccaacagcttccactaaatttataacatatacaacatctaaaagtatcactgatctagcatgaactcgaattatagaggcattcaatgcccatcgggtaagatcaccagcctcttcccaagcactcaaaattgggcagttttccagtggaccataaagctcccaggaatgctgattggcatgtgtgtttgaatttctggtgctttgtaaaaggaacttaatccacagaagagtacctggaagagatggcatcttccctttctctgtgtgtgtcttacccccacatagaatcgtcgtaataacttcccaggcccagagcacaagtatcatctttattttacctatagtattttaaaaatcgcaacataaattcctccccagaaatattttttacagacacatcttttttttttctttttttttttttttttttttttgtcttttggcaaaagcaaaatcagactaacaggaaacacatcagccctactcagacactatcttctggcctgcaatgaccaatcctatttgagacaaaagctctcaggctggtgagctgtcaaatcgctctttttcttccaccttcccaggatcattggtttgagccaagggtcccccatggtactgggctgtgattgccgcataggtgcagccatagatggcagctgccaacatcatgagacacacaatcccacacacaacgccagtgatgatgacagtggcaatggcatgacgcaggttggccggccttggcttgggtttgagctcgcactccaagagttctcgctcccccgcgttgtggttctcaggaggcctcaggaccacaccgtgggcagagccgggccactgagcctgcgaggacactggatcaggagcaggaagagggcagggctggtacagctcatgagggatcctaaggaggtcctttcccttccaggtgtctggtgattcacagatgatgccgtctgttagtccccctttaaaaaacaaaagcaaagaacaataacaaagccttgatacaacagagttccaaaatcctctgcctgcaaaaacttaggcagatggaatttatgaagtaccttttttttttttaaatcctggagtcaaagaatttaacaaccatattttatgattttaggattcctaaattggctaaatactaaaaatgccacacactaaattggcaattacttatgaccaagaattcattagaagcccagtaaccttcatgttctctaaatgctcagagaaaacaatgcaaaagctgacaagaaggcacgctgggggccgatggtgagggcacagctgcccactgcattcgtgccacgcatggtcctagtgagccccacagacaagaaaacttttgtaccagattcccattgaaaatctaaggaaaaaataaaataaatgtgcattgttgtgatgttatgtgtttattacaaagatcctgtgtgtctcaacactgttcagtgatgccaaatggagaggtggaatggtcttggagtgatctgtggatttgacaatactggaagtttagttcctggaattcggtaccatgaatgtgtctcctcaggcctcagaacatttacggctttgaatactgaactttccagtgggttattaaacccagtttccattacctgtaaggtgattgatatcctcaggtgtgtagactgctgttggtcgggggaatttgggtggtcggtcattctttcctagagagagccctgagctagcagactgaagtctagtctagtgtgaccactgatttactctttgactttgggaaaatgtgcttcgctgacttaattttctgccatgaaaacatgctatttgtatccaacttgatggtttacaaagcactgttagataagtcctaatactccactcttgtaggtaactcttgtccagactcacagaggtcacgagtggatgaaacaacatccaaacccagttctccatgctcagtccaagttttttccactacactcgctgcctcgccacatcctcctctcaggagcgttgtgaggtcagaggagtgggcaggatggccctcggcactgtctgctaggaagccttttgattggacagaactgccccatgacctgcaccttggccctctcaggctgccataagcacctcccctaggccagccgaaaagactggcactgcagttagcaaagttagattggaggagattcttagtacacacagtaagtgaattaggaaattataccagaaagacatatgtagagggcatcacttcaacattattagcaccctccattgcatggcacttcagagttttaggaatgctttcacatttactctctctaagcttactacaagataagtcataagtggccctgtaagtagatagggcctatcttgcagtgcaaggattatcaggtggccccaacacaccagggtgagtggcagtggcaaaattcaacccatgtcctttttgttgccactgcttaaaactgaatcacccaccaccagagtgtcttgggttcctcctggcttctctagcaatcctttgaggaaacagtcctcaccctaaagcagaaagataaaaggggaatttcttccttttttgagccactgattttcctgaggccagaggttcagagcagctgctccagatgagttcaaagtgccattgagattaaggattcttgcctcatggaccatttcattcctctgcacctgaccataggagcctctgccaggaagttggttgcaagacaaaaaggtcagagagacagaaatgaagtgatggggctttgagaagtagtcgtgatatttaatccagccagagagcatggagacttctatcaggggaagcaagaccacctgccagggggatggacaggttcatcagctgacttccaccttgactagggtggtttacccaatcaccccagacttaagaactgtgtttctccagttccagactttctgttgttcggtattaaggtgggagccacagcctctggacccagagccaaggaaatacccagactggagcctgggacatagctggaaggcaggggctatggctgccaaatgctctgtggtctcctgtgcaggtgatcctcagccgggatgcaactcccactctccaccatttcatgggccatgaccccctcgtcaaatctgctgattacagcttgagggtcccacatccttctagattaatgtaactgacaatgcaagaagctccagcttgccaagcactcattgttctctatctgatcactagtagctcttcacctctgtcttgggagaaactagattcaaatcttgagtctgaacattacgtagctgtgcagccgtgaaaaactcccttgaccacgttgtgcctctgcttgctcatctggaaagtgggagatgaggataattaaaattcacttcccaagattgctctgaggactcagttggataaaatatatcaagtatttagcataatacctagctcagagtaaatgtttagtgaagtgaagatgacttgtttactagtaaatagagagaaatattaatcatacaatctgtgtgcatatttctttggaggagatattattatgtattcaccaaagcacatctttttgctcttaggccagcaggaagactaaattttcccactttttgtggtctatttgaggccatgtgattgaattctggacaatggaattcaattaattgaattaattaatgccacctccaggccataaagcccccgtgtaatccgccatgcattttgttcccacttggggatgaccttagaggccacgtgataaacttggcgacatcacaagctcgaggggtcttatgtccctaaatgactgcatggaatgcagaccatgcccccatttcctttgaactctgccatgaatgagcaacagattttattgcatatataactaaagtctgggctagtctgttatgtcggttagcctgccctaatacctgtagtgtttgcatttgtttatatatctttttttaaaagaagatcttgactcatatctgttcccttattttgcctgtattcaatatatctataatcagactgtctcccatgtttgacacatatttggatttttcctagttatgttgggacatccaggtcttattaccccaaatcaatttctgccttcctccgaagaaaagctgtgatctgtactcatgcagctctgttgtgacggcgtgttgaaatgcgtcacagaatctgaggactggaatgggccgtaggaactccctgacttaaaactatcagtttccctctggtgacactgagtgctagggaagtgtactaattttcccaaagaccaccagcaagtttgtggcagagtagggcacatttcatcccatcccaggttgcttccagtgccctagtcctgggaactttttttttttttttttaatcaagaaatgttctttaatgaaaactatctttctgtgttggctggcctgtgcttacaatttaatccacaatacaatagttcaagccactttacctgtagacgtaaacaattttatttgtaacctcttataaggaagatgttgccatagtatgtggctcctgttgctggttggcttgaatgtcgactggatattgattatgtaatttactattacattgttgagaaggatttattcaatatcgtacgttttaacccatgttgtattcaccctaacctcattcccgctgagaaccgctacaaccatgcagacactgttgacttccctaattcatgtctgtagctccaacatcttcctgagcttcgggcttaaatatacaacctccaactcaacgactccccatggatatgtacagaacatctcaaacttgacatgccccaagctgaagtcctaattgaccacctccccaacacactcactcactccccccagtcccctctttgccccttgtcagctgaaggcatcaccatttacttgattaccactgcaggacaaatcaaaatagactttcccataattatggtcttctcttagtcatccactccaacccattagcaatgtctgccagttcagtattccaagtatctcccagcattgatcatgtctcaccaccctggtttgggccaccatcatcttcgctggctgactgaaatcatcttctccctcatctccctggttcttcttctgcagcctttcgtcagttctcccaagagtctacagagtgaccttttacattgtaatcagatcctattgttcccttgactaaaactcttcaagagctttccatctcacttaaagtccaagcatcttggccttctctgcacacttctgcatgatctgacccccaagtactggtgttgtcttgtctgtgtctactcactcccttcctctgcactggccactgtcttgtccctctttttgtcctgcagccaagccaagttttccccctcatcaagccctttgcgttcactattccttcccccagttatctcatggctcattcctcctcagtctttgggttctgctcagccatgtcacctccttggagacatcttcccatccatcctatcaaaaatgagacccacattctatcactctccccttcccctgcctcattgtttcttagcactaactgctattctaaacatgtatctttatttatcatcttatttaacatctgtttctactaccagaatggaatctctgtgatggttaggcactgccatcttctcagtgcctggcatacaaaaggcactcaaatatagaaatgaatgaatcatgctgagagctaggaagagtgaagcactgtgaagtggaggaaagaatgtcgggtcaagacccaaaagccatgccttctgttctcacctgggcttctgctctgtgatcttgggcaagtcactgaacctctctgggactctgttgcccattgacaacaggggttggcaaacttttctgtaaagggccagatagacaatacagcccctgtcacaactactctgcttttatagtgcaaagcaaccactcactcattatataatgaatgggcatggctgtgttccaataaaactttatttacagaaacgggagatgggctgtggccctggggctgtagtttgctaaccctgggtggtttccagagtccctcatctttaatagtctgagatctcttgctttgctgttgtcatcatgttaaagaaattgtgagtaactttagagagaggccctgttgcacccaatttcagtgacattggtgtttgctaaagcagaaaggacaattttagaaaagaattacagttgtcaaatgggtagaagcagacaaagagagaaaaatatcccagagagagataaccatacccacaattggatcagacttgataataagaggttggtgttatttggggttgagcagttattcaggtggtgattgaatgtcctccttcttaatagcatactcccagataagtaacttcttgttatattaattaaacaagtgaaagttatctccatgcaacatatttgtagattaatttcgaacctgaatttaaacaccttctaatgactcacttgactcttttgccataccgtgaaatggcaccgatgtgtaaaagcccaaatccaccccttacacactcctccacattctttctaatgcagagaacagatgagattcatcctaggctggtaacacacagatggggggttccaaatagacatgactgacctttatagacaaatttctccagccagagtttaagaccgagcaagtggcaattgcatttccagaggttgtccttgagaagtaaaagcctcacactgggcatggattccaggagcgctcgatcaagctgctgaagctggttttgttgaaccgcaagtatagttaggttctcccaagtctctcccaaggatgtgggaaggtggcttatgttgtttgatgacaaatcaagctccctcagctgagggagggaatggaaaagtctgctttccagggaaaggagtgaattctgggttagatttaaaacctgcaagtgctgaagcccatggaaagctccaggggccagatttgaaagggaattgttggacaagtttaaggtcatgagccatggcactgacctaaatgcaaaagcaggaagatggtgtatctgattatcttgtaaatgcagcgttcgagtctgaggaggtaaatgggaagggatttcggccagaccctgctggctgcagtctacaaaatttgtagatgactgacagtaacacttgtccgggcagctgcataccacctggagcaggacaatcacactggaaaacaggagcagttcacctacaacaaacagaaagaaattgggataggaaccagtttgtgaggtgtggtatcagcacttttccgcctttgaatttacaggtaatgtgctttccagccaggtgaaaccttctacaacctgcaagagaggttctgtcactcaccgtctttagtagagccaggctggtcagagtacatccccagtgtcattaccttctgcagtctttgtgccacctatcgtctgaagccttgagaaagatactctcagtgtcttctgattcggaagatggaagacttagtgatatcaaatagaagggtgaaaaaaaatatttggggtgtatatgccgtttgtaggccacaacagaattatttggggccagatgtgtaaaagagtgttagaggatttcagatacttacatttctgtaaagtatgctgcagaacagtgctgtctaatacaactttctgtgatgatagaagtgtcctacatctgctttccagtatgggagccaatagccatgtgtggctaccgagctcttgagatgcaactactgcaaccaaggaactgaatttttatttgtatttcattttaactattttaaacaacagtagccacatgtggctaatggttactgtattggatagggcagatctaaagcgctgctacgtattgatatccatttttgccgttgtaattccatgaacaaggatagtgtctgctgcttttttattcaagattataaaaatatggaaaagcattaagaatagtataataaatacccattttctataatagttctgcaagtccttcatgggttattgtacttccttgattcttttttctttcaactcagaagagcaatgcattacttatgcagttgaacttactttgattcatgcccaatttctattttccagcataagcccttttcctcacaccattactgatgtatccctccagacattttaaaaacaatcattagtaatgacaaaaatctcaaataaacatatagcatgcattttgagccacctaccattctaagtgctttataaatatgtatattaattaatcctcataaccttgtaaatatggttccattattatccccatttgaaagatgaggaagctaggcacagaaaagctgaatcacttgcccaagttcacacagagtattatagtagagctgtgataaggaccaaggctgtcttcctccctccagagtctgtcagagttcttatctactgtgctccacttttcctccctccagagtctgtcagagttcttatctactgtgctccactgcctgtcaaatacacacacacacacacacacacacacacacacacacacacacacacactctgttttacataacactttttaaaaatccagataaatgtaatcatcaatatgtctcattctgcaatttgctctgttcactgaaaactgatctatccacatggatacgtggaaagctaattcattccttttaactgttgtagcatattccatggtgagagcatgccacatttagtattaatatttacccccactcttatgaggggtagttgaacggttgcagtttttttcttcattctaaatgatgctgtaaaacagcatccttgttcagactgccttggctgtgcaggaactgggagagggtctctggaatccagagaaatcttctcacagggctcagagaggagattaagttcacattttcttagatactgctctgtcattcaccaaagtagctgtaacactcccttctttttttttgagacttgaatttcaaaatatgacaaacatctgccaagggcattttactataaagtggtagaggaattcatgagccacacagtaatatccaaaactcaaaatagttatctactcaaagtggaagctcttgaaaggggctttgtttgattgattgtttgcttgcttgcttgttttgggccttaactagggaaatacacagcatggctgtcatgcacttgagccttttcccctttcttccttaaattctctactgaggctaacagtgctctagggcaatagggaagatgtttagagagccttctgaaagagagtcttctcagtttaatttagtttaagggatgcagaacatcacagtccccttcccctttccagaatatcaaagagcaaaaccactgttttcctttctataattttgcaaataatctaaatgactcctttcaaagccaaaacatcttcccctcagtaatgaacggacacccctcatttttagctgtggggctcaagcattaattagttgcaggaaattaattcttaaaccagagaacatgtttgccgcagaatccactgatctattaatgaaaggcttgcctctctgagattgtagccaatttgttcattctttctttggttccacttttccccccaaaggaataatatacgaactccaactacaagcaccatgtttcctatgaaatggcccgtgacatgccaactacatattcatgtcatgactgcatacatttctctccaccctcttcctctgcacccaacatgcgcaaacataaatcattccatgcagagacatttttcatatctgtccagtcttttaagacagacgacttgaaaatagatttcccgcagatacctttgtgaggggataccatctttctcccagacaagaacttttccaacgggaattgatcagggctcacctttcatgactgagtctccttgggcgtccttgctgacctcgtagaccctttaattaatgtgcagagcaacacacgaagggcatggcagactcagagcccagctttacattcagtctttctgaaccctgcccttgcttttcttcaatgcagaaaacagttgttgctttcaaaagaccatttatttaagcagcccttccccttgtctccatctggctgggatcagtttccataagaggatcttgggatcgtgcccctcttctttcttaaaatgttggcctccccaggatcatccctgcctttcccattcagacgatgagccgcgtaaagaatgtttgtcaaaccttggtgaacagctgtagcattcaaacatgaccccagtgcctcggcctttttgattatttaatctgcttgaagtacagggcaccaaaataaaactgccttcttaatccggctgtggcttctgaattctgttgacttattaaccatgccgggtcacccctctttgggttgggggatgctggacgggaccctcacctgggggtcgagcagcagagcccgcagagtgtgtaatatgaggacaaattggcctgctggaggctgacacggtttgcaccgtgcacttctttggtcatcgaagtcttattcagccaacatctgtggggattagctgtgttgacagggtcttgatgccctgaaattcatagccatggtttcctttagtggacatcacaaccttccttctggtgccacaaataacttctcagctgcttgcttgcttgcttgcttgctgcccccacaccccacccactccccagcccccgagttgaattgaccttttggttagtgtgacttaagaaatacttcttaatctttcttcgtttccctgatgctgaggtcctggcccttccctcacttttcacatataaaacaataaagccgccccctgtgagcatcaggcgtcagtcgactgtgactcttctctaattgaagcttcagggaactttcccaccagggactggaaccgtttctttgaatgtggaaatcccctgccatttgctgaggtggggtttcaacccctgaagctgcccttctagataaaacaaaatgttctgctgtgtgtaactgtgtgtacgcttttatggaagcagcatgaagtgcaatccttggctccaggaggtataattgagccattgggtttgggctctggaatcaggtgggtccagagtcgatatttggctccaccatcaccagctgcgtgtctccaggcaagtgacttacccacccagagccccatctctgacatggggacaacattagcccttactttaccaggctgtgcccaggattaaatatggcagtacacgacatggcccagagtgtcttcataagtgttcacaattttgcatgagaaaggctttcaggatttgtatgctgccaacttctgaggacaacctggaccggtcagcaggaggaatgtcctgagggaggtcttgacagagggccatggaacctggcccttcgtgccactctgcaggtacaaagggaagaggccctttgtgaatggaagttgaaaacatcaaattttgattattttcaacaacctgtactttgtggactctttcatcctttggccaagccccttgtcaccccacataacccagtatattcatcctgcctcttccagaaagcccactttacgcaacctgccatcttttgtccttctctccaacatttttttgagcatcacacatacaatgggcaaaagtcaggtgtaggtgacaaagcaagtcaggtgatgaagagccacttaaatcttaagaactcaatgatttcttccctccttccttccaatccctccttcctatccatctgtttcaggtgcacagaatttaatgacaataatttccattattaatggaaatacatacataaccatcaatggcccccattagcattcaatcattaatttatcataacacaacaaacacttgtgaacttaacactccttctaagaactagaaagttactaataactcatatctacctgtgtgcctctctctttccctggggtcagaaacatttttttgtgaaggccagatagtaaacattttagaccttaagagccatcagtctccattgcaattattggactctgctgttatagtttggaaacagccaaagacaatacataaatcaatgggtgtgcctgcattccaataaaactttatttacaaaaacaggtagaggcatagatcggcccacaggctgtgatctgcaaactctggttatcccatcctctggcaactgctctcactagtccaccaccccacctgtcacccaccctcaactcccaccacccaggcaaacatatccactctcctgttgcctcatctatcaaatgagggggttgggtaagatgatctttaaggccttcttatgtccagaaccttgtcattctggtcaaaaagcataaatgggattgaaaggcactctacttaccagctttaagggggcttagacagacagagaatttaaatacctctttaggttatagtggagatatttagctgtgtctataaggcccagctgggatccagatatcttagacttgggggcctgaaaatgatcaatctattgacagcacaattggatgttggaggtcaagaccctggcagagaaccaaaggcagtcaaggacacttctggttaaaagctaaatgaagaagcacactttcatgctgcttattccctaaagttctatggtcctgggaaaatcccaggctctctgagcatcagcattctatctgtagaatgtagataatacctacctcgccggaggcagggaggatcaagtgatacttaagtgcctagcacatatctggtagagcaaaagatccaaagtggcatcttggccaagcatggtggctcacgcctgtaatcccaatatactttgggaggctgagtaggtggatcagttgaggacaggagttcgagaccagcctggccaacaaggtgaaaccccatctctactaaaatacaaaaattagctgggcgtgatggtggccttctgtaatctcagctactcaggaggctgaggcaggagaatcgcttgaacccaggaggcagaggttgtagtgagccgagatcgtgccactgtactccagcctgggtgacagagtgagactccttctcaaaacaaaacaaaaaacaaagtggcatctcttactagcagcatggatttacagacttcaaagagtctgagctggctgctcccacctaaaacacgaatgcccaggaaactcctagagaagccccagagctaatgggttcctggcaacatctgcttactgcccaaggggtttttttggttctgttttactcatgctgaccccaattgggggttaaaagatggacaatgcacacatggcctggactgcccgccccggacacttggatgtggaggctgattgatttattccatctgacctcagccaagagaacaaagggagggtgtgtgatatgcatgctaatgctaggcagtgccttttctttctccctccctcccgtggtgagcagatccaagaggtggcaagacagccatgcttgcaaaaagaggaaccaaggagagatgctgaatgcagctcaggccagagccactccttaaagaggagaactgcactatgagggtctcctggccccaagacctgccaggaccccaggttcccacatgggagctagctgcagatgcacccgtagagtaaaattgtgtttatattcacactgagatttcaaaaatttccaagcttctgagacatattcttttgccctttttaagccagaatgttttctaatatgttagtctatttaccatttaatttccctgaaatgaaaaatcaatgattattaaccctacaataaaattgacaatgtcttgaaatccagcatgtaatagctctttctcccaggcaatattacacaggtatttaaagaataaaggccaggctcagtggttcacgcttgcaatcctagcactttgggaggctaaggtgggtggatcacttgagtccaggagttcaaagccaacccaggcaacatggttaaaccccatctctaccaaaaatacaaaaaattagctgggtgtggtggtgagcgcctatagtctgagctactcgggaggctgaggtaggaggatcacctgagcccaagagtgggctgcagtgagccgagatcacgccactacacagcagcctgggcaacagagtgagaccctgtctcaaaaaataataataataaatgaaaaagaataattagaactaaatatacccatctgggagaatattcataataaagtgggaggcaaaataaagcaatttgaataggaagcatattgtataatcccatttatattcaaaaaagtgttagagatggaggaattaaccctataaatacgcgttggtttgtctgaaaatggaataagtgggaaaggtcagtcaccaaactgataatgctgattacttggaggggagactaaagaaaaagaggggaaaataaatgttttctgcttatacttctgtatattcaactcgctacaacaaaaattaagaagcaagtaaaggcacatttcctttactggaatatttgagatgtcttatcttctagtgactggctgagttatctgtgtaaatatagcatgcctagagtttgcctcctctctcaccaagagaattagccccacaggtaacatctgtctttctctgccaaggggtctctacgtgtgatgagcccttataacaaatatgagcatttctcccaattgtaaggtctgccttggtaaagtcatggccaagtgctcctccatccctgtcaacaggctcctcatccaaaccatgtggtatggcgatctaatgccagggaaggcagccaggcctagtgacagctgcagccaggaatagtggggagtaggcccttggcaccacaaatccatgcagaaatttcgtttggttagaaagaaagtttgacattggaggcatgtggataatagtgaaaatagtttcctaggaattgtggatgaccaaacggcacccaggtacacagtttatacagagctattttaaagttttaatattgtcttccatccatccatccctcccttccttccttccttccttccttccttccttccttccttccttccttccttccttccttccttctttctggacctctgcctttggatttactatcctataagagatagaaaaataagaaacatagaaaactaggaatatattttaaaatgacaatcccattaatcatgtatttaatgcttacaatggggcacatagtgctaataatttgtattaaaattatgctattttaacaaacaacacccaaatctcagtggtttaacagaatagctcatttatttctcttatcacagtctagttcaggttgacaggggcctgggctccatggtgtcattcagggacccaggcttcttccaccttttggctgtgacctcttcttggctctcagagccctctccatcagttggaaaaggtacttaccacttctgctcacattctattagccagaattaaatcacatgaccatgtctaacagcaagagatgctgggaaatgttgtctagcagtgtgtcttggaagaagaggaggcatagctgttggagatcatagcagtttctgcctccacattttattgcattatctcactttaaagtgacaacaactcactagacattaagtttcaaatgacctgtttgtttcccatactttcttcaaaacccacttaataggtttattaagtaaatattgaatgaataaagatattactattacttttttttttttttttgagacaaagtctcactctgtcatccaggccactgcaggctagagtgcagtggcctggtctcagcttactgcaacctccacctcccaggttcaagcaattctcctgcctcagcctccggagtagctgggattacaggcacacaccaccatgcccagctaattattttgtatttttggtagagacggggtttcgtcatgttggtcaggctggtctctaactcctgacctggggtggtccacctgcctcggcctcccaaagtgctgggataacaggcatgagccattgtgcccatccatgatgttactattacttttgatacaaattacaaaacagggacggagaaggtaaaaacttacccaaggtttccagcgttatttgttgcaaacacatggattgtgagtaccaacgtttaggacaatattaagggaacctatagttgtattcattttatgccctaaggtcattttttacacaacccattcttttgacattaagatgtaaattgaattatctggaagctctgactcaggaggtgagaacatagttccctcttgagccgttcagtggagaaccaaggctgccatacgttttctctagtaagaaagtggggaggttgtgttcatctccttgtttttttcttgcccttttgataaggtaagaattcaggttcaaggaatgcctaggattattccgtttactgcatatgaatatcagcggagtttgaactccctttagcaggccttgagttgcctgataaaattagtggagtagtgggtttgaaatgtatgcctccagcctccctaaagctaaggaagacagtggccaaaatctttcttttcagcatccacgtgtccacagagcctaagacttagccaggttctgtgtagactagaaaagatattgcatactggttcctggtcttcaaagagctcaccagtctgttttgttttgtttttttgtgttttgtttttgttgagacagagtgtcacctgttgcccaggctggagtgcagtggcgctatcgtagctcactgcaacttccatctccaaggttcaagtgattctcatgcctcagcctcccgagtagctgggattacaggcacacaccaccacaccccgctaatttctgtatttattttctagtagagacaggggtttcacaatgttggccaggctggtctcgaactcctgacctcaagtgatccacccgccttggcctcccaaagtgctgggactgcaggcatgagccatggcgcccaagtctggagggtgctatttagcagttttctcatcaccttgaacctgttttccatgagaagactgcacgtgattttgtttgaacaaggtagggtttccctgacactgtctaactctcagggaaccagttcttagaagtccttgctggggaacttcagatggtggcagaggtagaccatctaagtctacctctggggtagacttgcattttgggggttaatcctccctatactgtcagggttagaggaaatacagacttcccattccaatatcttcccaatgtcagccttccagcattcagttgtcctgcactcaggacatgtgtaaagataaagatgcatttcagataagtatgattaaaggtaattagtgagctcatgcggctggtggaataaacataggcagatgctagttgacataaagttaatgaaagaaacaaacggatcaagaaacatggcagcttaggaagcctggccaaagcctcacagtgacacgttgttttacttagatcttttgagtggctacttttgtctgtgccccaggaatataaattggaatcaaattcatgttcatgtttgattgtttgctcatgttaacacatgaaatgagtgttttttgcagttcttgttgttgggtttttatttgcttttgtacttttactataacgtgatagttcagtttctgtaatagattacaatgtatgtttcatatttttaaattatagcttactgtatgtatatcatgaagcaataacaagtctgtgttatgcttttttctctttaaggtttgttctatatgagttctttgatatatacatagcttgaaaatgctctggaaaacagttagtcttaagcaggacttagattgtagcccacattacacatcctgcacttcaggaatcccctttgtgagtccaatcatttcattttagaacagtgttcctgctaaacacatggaatctggagtgaaaccatctaggctcaaaaataccgcctccaacatttactggctgtgtggccttgaatgagttacttaacctctctgatctttaacttcgtcatctgtgcaaaggaacccagcttgcagatttatggaaagggttaaacagttttttatcacgagaatcatagcaaaaaaaaaaaaaatcttttgcacatagtaatatacattagctagtatcttctattattgtgtctataggtatcaactaggtacttagattgtatctgcttgaactaatctgcttggtacaaaaacaggcaagttaaatgcaaaggagtattctgcccgtggacagagctccccatcttttcgtattataaagcctttgtgtgtgtgcctagaatcaagtgcaatctcagtgaatttgtgctctacatatctctgcttgtcatcaaagtcgctccacaaacaaaggaaagttgattgttagtatcatgcaactaccactttcatgtgggatgtttgttagcaaaataaaggccctgccttgactttgctgcagcctccattcaggtttataatgggcaccttccccttctggtgcaatagtgatgttctcatcttttcttttaattcaaaaatcccatattgggttacctactacatgctcgtgctgtgattttttaaggcttccctgtggaccttgtctccagtcagcccgtcgctagtaggaggccctctttcccatccttgcataattagagaaagcatgtagtcatctccccagggctgcttagctttcatcatgaagcatgactatcagagttttgaggttgataggagtggaaacattgtgttcaacaagcaagctccttcatgtgttgtcaacatttcatttgtgattctaatgagggctgaggagaaaataaactccgtgtatgctctcactgctacggctgatgtttataagttcctatccatggcctccagttgctcccaccatgaaggcatctggaaaggcagctgagtgccgctgtgtgtgaggaggtgctaaggtggttagatttgctgagaaagagcagtgcccgtgttcaccccttagagactggtgtttctctatttttggtgctttccacttctgaaggtgaagacacccttacttaaaaataaggtgtgctcaagggactctcattctggacccctttgtgtgtattctttcttgatgaaagaagtatctactgagtgttccctacctgcaaagctctgtgtttgggaatgtcataggcatcaaaataagacacagctcaatgaatggacctacagtccaaatggccactacagtgtagaaaggggacagaaattcattataccactatgcaaatacagttgtccctcggtatatgagggggattggttccagcaatctgtgcttgcaccagtcctgcaactggccctgtggaacccacatgtaggaaaagtcaaccttccaagtatccaggtttcacattccataaattatgtattttccaatctgtgtattagtggacctgtgcagttcaaactcgtgttgtgcaagggtcaactgtatatgaaaaagtacagccattaaaagtgcaaggaaaaagaggtacatggttccataagagaatgcagtctggcaattcagcctgagaggtgagggcaggcatcccaatggatgttatagccaggctgaaatctgaagtactagccagaatttaccacagagaggggaagagacgagggccattccaggtaaaggcatggcatgtgttacgctgagaggccagtgagatggcacagcatcttagggactagcagaaggcgggcatgatcacagcacagagggtgaggaaggagcttgggcaagcaggtgctggagaaggggtgagaggctggttgctgtccccgacctcatctcccggtcactttattattaatattgaaaaccattggttttcaccatctgaccataaccagagaaaagccccttgctgtccctcagtatgcttctcagaggaggtaaagaggatgttgatttcacaagcattatgaaatccccgtacacgtttctcagatcctgagctttgatgtggagttggcagttgtgggcaaatcctttctgcatgtgtctgaggggcagcagaatggcagagttgcattctcaccacatcagtgcctgggtccagtgcagtcaaggaagaaccagccctgctggggctccagtactgcctggatgggacgtaacatttcctcctgtgagtttgtgtatatgttagtgcagatgcaaacactgcagcagaccagaagtggcaaatgagtgtttacgtcctgcaactacctgctttgtggcctcatggcaaccttgctcagcagcccctggggccatccatggcctcagaatcctttctagtccagtgcttgaagcagacagtattagatagccaactggtggcaccatgctaacataatcctagttggtgttcctgtagtatagatccttgccatttgcaagtttgactagcccaaatgcccctaaagtatataatacaaagccaagcatcattttgctgaagggagaatttgaatcatgccctgggaagctattgaccaagcccccttagttacccccacccccaaattatacatcttgatatagactcagtgtcttctccttgtcctgtgaccatggtaatttttctacagtgataaaaataaatttttatttttaaaaacgtctttcaagggaaacacaaaatttgagagcatgttgaaaaagttgttgtggtctgtgcatttgcacaggaaacccatggcttgcgctagaaatatgattctagaaaagtcagggttgagtttgggcatgtggacaatccccattagtgtgccatgggcagtggacatgctgtcccgctgaagctgtcccaggagagcatgtgcattggcctgcagaaatgaagtacttagtccagaggaagttgatctgaaaagggtagcacacgttagacagcaaactgggaccaagaggaaactgtgatgctacctctccatttgggataatgaggcactgttatttagcagtttattatttggttagcttttcctctgtctagatatccaatttgttggacacagtgcatccttaaactctcaaggctgaatccaacatctgaaactcttacaaccttccagaagttctcagacacagggtgctttacctggaaatgatcatgttatttctccaccactccagggtaggaactattatcttctacatcttactaaagagaaaattgaaacttgatgagactgactcacttgcctgagacccaatttctaaggggcagagctgggacttgaaccctcatctgccggacttcaaagcctttgaactactctgcgtttttatctcatcttattcttcccagtcccttcccctggcatgtggagaaatgcaaaagaagggccaagacattcacctttgtaggttcccgctgcccatttcttcagggaggcagggccacagggaaaagagggcagcctgctgtctgtctgctgtggccagggattgggcaaagtgtgctggggccggaggtggggaaagcaaggcattttgtgcagagagttagcaataacctggtccatcccccagaacggagctatcagtcagatctgggacacatttgtcatggctgtttccctattcagaagccgcccctgcaggcccaccctctcttcattgctgggcaggaaggagggaactccctttgatctatagaccagtagcgggagaagcatggcattttgtgggcctgctcctgcccttcggcccacatgattgtttggacaaccacatgaacaaaagccgctggccatgcttgctttagagcatccagagtctgaagatagagcatgccctggaagaaagtggaagtggaatgaccactccctttccatgatggatttctaggtcataatgcagaggacaggatgcctctaggactcccatctgagcagatgagcatctcagaaagaggggtggaagatggagaaggtggagctgaccttacagccttcccactggacagctcaatcttctatggtcaggaaaaaaccacacactcaccacattggtgtctagtctcaggccacagccccacactcccagtaagaagcatttgcctggagacagattagctaacttttgagacatgtgcacagttttaaaagtagatgggtagctcttggaagactgcaactattttctacttatccttgagaaaggaagatttttgagtcaagtaattctgaatagggagcaactgtcttctaaaaatatattcaacttccctgtagtatagtatactttgatgtattaaaatacagctcatcccactcagattactgcctcggtgcctaatgctgtaaaattaaactgttcctcactgatattttattaagctccaccaacatttcagacacagacagctcacagagcttcgggccatgtgttttatttgctgtcagggtgaactctgacaccagtccgtaaagccccctccccttgtctttatataatgcagcattttcaaaaaccttgctacaggctactcccaaactgtcactattggaagtgaacatcactagttttctgggtgtgaatgcctaaaaggaccaaaaagaagcaaacaataaggctgttgtatgaaaagtctttgtactctggacgttccttttgcatttattctgtgcttgatattattcagtttatttttgcaggttttgcaggggaagggggctttttggtggaatttttctgaaacccatatgcaaaaaagggcatatgtttatggacaatgagttcacctccctagcagggagccaaaggtatctgtatgtttgcatcttgaaaaataaatggatatagccataaatgccgatcctcttaacaagactaactttgtcatttaataagggagattatttcatagatttaaaaccagttaacacatttaaaacttgataaggcaatcctggtatgtttccttttctccagtgattaaagcaaatcaaacactggactaggggaggttttccatggtacgagtaatgccgtgaatgtttctcctggtaatgcaattaggaaatattggccccagttaaagtaacttaaacaaaacatgttgtcctcatcaaacttgttcaagttgttaaacaggcaaagccttgtccaaaaagtaaaaaaacaggggcatatagtgtttccatggaaactctgttaaaatactgatttgtggatatgatcataatcagccccataatctaatatgactgaattaaatgaaaaagaatctcagttatgaagtaagccccctgtgtgagagtattcttacacatgcagaaaacatatggatcctgacggacgctattttcaaactacttattggcccagggatggggctttaagactccagtttcatctgtcgttttccccctccattcattgttcatcgtttttataatgccgggattatgtgggtgagcagtaaataaaatcttaacgacatttgggtttttcaatatctatcattgctcccctcacaatgccccatattgttttcattgtcttttgtgacaagacaacccataacatttaatggtttgtgggatgttacaagtttaagttttattaaagtaataatttcttcctgctaatgggatcttggtagaattctaaccacgagggttcgcatggatgtctttgacctctagaggaagggacattaagtcaaaggctagggtgagtcccttgggtctggggagaggcttcagggacatgcattggcctcctccctgccacacagttctgcagctctgtttgcacctgtctcggctgtagtaaaaatggaaactgctcaccatgggataaacttcaacctcgtgaaatggcaatgacagctgcctttcagtaaacctacttgatttatttgaaaatcattccatccagagatcatcacaagtggtattcttgggatcagtttctttcttgtaaaaatgcgtcctcagtcacataggaacttcaaatagggtttaccaaggaagtgttggctagagcctggcaatcctttgttaccttagccatggcatcccagagcatctgcagaatgatttctgcaacagggcagtgatacaaccgtgtatctctgcccaggtgtgtcagtgcttttaacgccagcccatggtcccttgaaagtcccagcatggctaagactcaccttctgaacaggcagtcagtcaaagctcaaagattcagactctggcccaagaagtaggggctgacctctccccctgagttctgccatcccctcccacagtggcagcagcctccacgagagcatgcacaccttctgatttgggcacagggagaaataagcgaagagggaaatagttttaggcctgaatcttgaggctgggaccttgaatctgctgattatatgctcctcttaatgcatctctatttctaagtaacttggttttatagcaaagtaatatatgaatgcagtttctaaaacttaagtggtgctaaagatgttttaaaaagaaaaagaagcaggagccaggcatactggttcacgcctgtaattccagcagcttgggagactgagccagaaggatcatttgaggacaggagtttgagaccagcctgggcaacatagcgaggctccatctctaaaaaaataaaaaaaattaggccaggcacagtggctcacacctgtaatcccagagctttgggaggccgaggcgggtggatcacaaggtcaggagattgagacaatcctggctaacacagtgaaaccccatctctactaaaaatacaaaaaattagccaggcgcggtggcacgtgcctgtagtcccagctactcaggaggctgaggcaggagaattgcttgaacccaggaggcggaggttgcagtgagctgagactgtgccactgcactccagcctgggcgacagagcaacactccatctcaaaaataataataaaataaaaactcaaaattaaccatgtgtggtagcaggtgcctgtagtcccagctgctagggaggttgaggcaagaggatcacttgaacccaggagttcgaggctacagtggactatgatcatgccacttcactccagcctgggtaatagcaacacgctatctctggtaaaaaaaaaaaaaatgagaataataacaatgttttttaaaaaagaaaaaaatcatgccctgatccatcattcccaacccctattctcacttcctagaggccaccacttccaactctcttagtgtctctgtttctcactgtcaagttaagattgccgttttttagttaattttagacatgtgtatttacttcctttaatacatggtgctttggactttttacaccggctcatcctgccctcttcctattccaccaacatgactgtatgcccatttcattgttcttgattaattagtcagcgaatatattattaggacaatctatgtacattctctattattttaatagcatggtatgtgttttcttttttatgttatttttccctggattagaaaatcccctggtcttcttattgcttggttttccttctactcatcttaaattttcccccatgtgtttcatcagatgtctcaaatatgtattactactattttctaaatgtttggtatttctgcctatttcatcttgctttggtgagatctccctctctgtgtcatcctatttcagtccggactaatagctctctaggtttgctgggcatgcaggcacctaagacttctcttccctatttttctctgtcatctccccctttctcctaaaccctcatgccttctttttttgacttaatttctcatttaggtgatgaacattttccagtagtttactaagaaagggtggtaaaatttcctccgaccttgtagctctgaaaaggtcttcattccatgccttcgtttcctaaccatttgactggccatagaatacctggctgaaaatcattttgaattttgaaggcattgctccattttcttttgacttcctgtgttgtttaggaagtctgatatcataccatttccatatcctttggtaggaacaggattgcccagcctccaccctagaagctttctgcatgttcattatgccaggatgctgtgagttcacttcattcattgtgctgaggacctgcgaactcttttgctttagaaatgcatatccttcagttctaggaaattttcttagattattttttaggtctttttgttttattatctgccacgttttcttttcccaacatatatctttctacttttaaattcatttgtatattttgactgttttattttaaatttcccagggtatttatttatttatttatttatttatttatttatttattttgagacggaatctcgctctgtcgcccaggctggagtgcagtggcatgatctgggctcactgcaagctctgcctcccgggttcacgccattcccctgcgtcagcctcctgagtagctgggactacaggcgcccaccaccctgcctggctaatttttttgtatttttagtagagacagggtttcaccgtgttagccaggatggtctcgaactcctgacctcatgatccgcctgcctcagcctcccaaagtgctgggattacaggcgtgagccaccgcgcccagcctccaagagttattttttatagcagccttttcttgtttcaaagacacaataacttcttttatctctgaatatattgactgtagttagagctgggggtgtgtgtgtgtgtgtgtgtgtgtgtgtttgctgtctctgctgtaacactaactcatttagttgtctgtttttctttcttttttcaaggtgaaggctctccccaaatatctgtagcctagttcacttttaagagtgaggcactaaaatgcagattgaaagtttctccacaaatagactttactattgggtgaatcaatgaaaacttagccaaactggagaatggggaagatgacagtaattctaggccttgtttgggggctataagcttgtttgtcagcatctgagagctgggcagggaaaggaaggttaggaattcccatcaatcagcatgcaggtactcattttcccagttcagcccctcctccctccctcatctgaacattagcagtttttcaggaatatataagttggtgtctgtggcatgtgcagcagaatacatggtgttgatacctgctagtattgtgccctccagtctgtctgtggcagtggttagaattgccaggggatctggctctccgagccttactctgtagtatcttggcctcgaaagtggccaagtagggccaccctgtcttcaaatgccatctcttttttgacctctctctcctgtatccagcccaggcatgtatctctttttccctaggagccaatgagtgtctccagagcaagaacaatgtcttttaggtgcctatccataggaaatacagactttgaggaggcctggacttctttccattccctcccacttattagcaccataacctggggcaagttatgtaagttcttcaaactttagtgtcagtgcctctcagcccacccaatggaatctcaagcttatccagtgcagtcagtccccagccccaccaaatgcaggtttgacagtggttccctatcactaccccattaggtgtctataggcagccttgcttttttcaagattataggtgtcctgggccattgtatgttgggaatcaggcagggaccaggcagggtttgcagcatgcagagaagttatttctgccaggtagtcagtgggcaatgcagcaaagctgaggtaatgccaggcgtaggtagggtggtggatggcgggggccatcctcgttggaataaaggaggaggcctgacctctatcccggctcctgctcttcacaagagttctttgccacgcttattcgcctagctctttccaaacagcaggaaaacgagtaccctgcctcattatcacatttccttggttctaagatgccataaatagaagtggaagctgctaaggaaataaaaagcagtatgcattgatgtgcctgtcctgaaagactctcagttctatggaattccacctcagtgtcttagcttctcatgttctttccctgcctctcactttgcctgttaatgcttacctccacccctagcttcaggctgcaggttaaaaaccatttctcccccagtccccaggacttggttgagtgccccctcttatactcctgtacccatcctgtacatgtcttcagaccaccacaatggttattggttgcataatatctgtatgccttcagagattttagcccagggaacacctgagctgtcacatccttcactgtgtccccagcacagagatcctcagtcagtatttgttggatgaagagaatatagagaggggaagaaaatgaaaggaggggggatgtgagggccgttagcagcaggaaagaagagaaagcctcttagaaacagcccttccagtggaaagtttgacttaacgaagaagagcaggttactttcaccaaggccttgttgcaaaatgccaaataatgacaggagagccgtcctttcatggaagctgggtgcaaacctggggggagctagcattttggccaacctcagaaaagcatgttgctttgctcacttctccactggatgcaaagaatccaatcctttcttaaacacccgaaatcatggaagaaatgaaaggtaagacatacaactttggaagtagatgtggtttattaaaaaaaaaaaaaatgatgggaccatttagtccctgactgagagtactcttaaggcatggagctgtagtgtgaatgatctttatctgtaattgtaacactgtgtcaataaaaatagttaagcattgtgaaaaattaatctgcctgtgaccatagtgcatttaagatgattagaattacctggagagccttagacaagtaattgggtcatcaataatcttttctggaaccccataatgaaagtgatcttccattctaggaaaatactataataccaaaactaacaattactgagctcttactgtgttccagacactgtgcttgatccagttttcatcatcataatcttaaagactgagcagaggcgggttaagtaacttgcctaaatcccttccacagctggtaagtgggatcactggattctaattctgagcccacctttactctatgctgcctcttaacttttccagtagaccaagaaacagaagaaaagggtggaataatcttccaagcagtgctaatgcaaacctaagagacagaaaacaaggtgtataacaggctctggttaggacttgctgagcagggagaaagaaaaagaataccaggattccaggtgatctcagctggcatctgccagtgcaggataggacttctcaggaggcactgaagcattctcctgtgtacctgcaggagaacctatactgttgagtctgtgggttagcagcatatatccacaaaattttgagtgctagatgtccccacagtggcctgatgccctgggaataggcctgattatagtatggagatagtggagacttagtagcaggcaaaggaaatttttgctctggctataccccatgaaaataagaggtcctgactcttatcagtcaggactcggtcttgggaacagaagttaccctatgtattccaaatatgaagggcttggatgctagccctaaggcaactagaagcttttataatcattgcaatgtttggggatgtgggtcaggaagcatccatgtaaatggttctctagcactcactagggagctgcttcaaacctcacatctgccaacaaatttgcctgcagctgcctccagagcaacatggcctctgtctctttgctgccttctaaatctagcaccagctccttattggcaaatgctaatctggaaccacagatgggggagattccaggaaatgcagtcttggcctttctccttcaatacagggcagaccttctacggaggagatggtgatgtccaggtgaatatcacccatcaagtgctctcgaccttcctatgacctcaaattacaatgacattctatttctacttctcctctcacccccagctcactttcccctggttgtcttgactagagagtgagataggaaactttttgactagaaaagtatgtgtgatgtgagcccaaggtccattccaggtgacctcttgagagcccatccagatgagtaattctctcactgtatcacctcacacctgacctcagtaaaaactggaagattcttgataattgtcattagaaaaaaattaaaatgctcccaagaggttagcaactaggcccttcatgggcatatatgtgtttgccttcttcattgtccagaacttggttactaagagcagttcaatggcctatgtacattcaactagtatgggcaaaggtagcatcttcctgcagtggtttcaccatgagcacctctgcatgatcagctaactcggtacaactggatgatggtcatggttgccaggcacactatgctggaaggatgatgagactccttggaaggaatactaggtttcatgagagacacttgacatgaaatagggaagggcaccattcatgccacagatttgcctttcatgcccatgctgttgtcagctattgtatttgactgtctgcatggaggtgcttatgtgacagatctctatacatgaagataatttgctcatctcctaccaaactagactacagttgcatctgtcaggagctgtttagtgcaggcaacaaccaccaaactcagattggtttaagcaaaatcagtaaattaaaggaagttgattatttgattatttggggatggttggaaatacattgtttcatgtaactaaaaagtccatagttataaccagcttcaggtacagttggatctggggctcagctgaaatcaccaagtttctcagtctcttgttttacttttctttgtgtcagccctgttctcaagcaggccttcctcatccagtgcccccagtattcatctgagcagattggcaaactcagtggaaagaaaccccctctttcctaaaagtttcagttcaatgtcctggggcttgttctccttgatatagttttggtcagtgcctatcactttggcacaggagcataggatgcatccctatgcctagcaggtggagggtgaagcctacacatgccacatggactggaaattggagtcatgacagctccccaaaggaaatggtctaggtgtggataaggagggagggtctctgctgctgaaaaaaggggacatgcctgctcagctggcaaaagtaacagctgtctattattccagctcagctggagttcaaattagtttgagccatctatgaatcacatcaggcaagttgctagcctctttggatcgttcattattggtttatgaaataagcaggttgggttcaatggcccactccaccattccagctcagaacttgtgtaaatctacccattgatgccatacccaaggggcagcactggaatcagggcacattatcaacattctcaagcgcattggtcacttatttcaggcctaattgtgttgcaaacagtaacctgaaaaaccgcccaacatcgttggtcagggcctcagaaaaattcagaactggttttgcaggggcacactccacagaagtgactgtggtctctgccacagatagatgcatccttaggctcctggatggaagactttttttgcctgtgattctttctgaaaactgggcccctgccaagctcatctggcatgctgtgctctgggtagaagtaattatttttatgaggcattattcatgtctagtctacctgagggccaccccaaataatgtttctctagctattaaaggcttcatcaggcatgcagagtctctagtagtttcctttaggggaaaagaaaaagattcgtcttgaagtctaccacctccagtggcaatttgctgtgcatttcagggccatgctaagtggttggcacctgaaaaaagggcgaagtctttttctttcaagtgcagctggaaaatgggagtcataagtgaaaagtagggaactgggagaactatttccatacagccgaggtagctttcttgttttgttctgagctggcaaacttcaacatgctcaagcaatgttttgtcaaatttcttaaatgctgaatgtggcactggcccaaatgaacgtagatgttattttagtgctgggagagatttattttaatgtacagatgcagccactacaaaggccccttttaatctgctgagggctctgttccttgctcttttactctttgcaaccccctcctcattttagggaacctgtgtatgctgtgaaattgcagtgttccttccttccctcttcatcttgcaaggcagcgatataatgctgacaataattataattaagatgctttgtgcaagaagaagcagtttgcaatgcttcctcctgtttcccagcctaccagcaattcaaagaatgctgcttgatcaaagaaaatatgccaacaggagagtggacctgcacagctccaggctgtggcagggcagcctcaacagttttccttatctaggacccaggttctctactcacgaaaggaacccgttcttttactgctcggctgtgagatgggaaatccatcagttgagctgagcctcagataccaatatcttgcaccttgatcggggccaaaataaacgggaagggacgcacagaggaagcatggtgacatgtgaggtttgcctgagccaagtctgtgctttcaaggcaagagcaggagaggagagccacagacaagatggggtgagagggaaaataaagaggatactctctgggctcagtggcagaggggaaactgaagccaggacagtcctgagtcttctcacacccaaggctccttttaaataatcatttgtaatattccctttactatctccaaatgaaattcatagaaaatgtaacttgttttcctatatgctgccaaaaaaatctacagaacgctccaactataatatcaagaactagttgagagttgtttataataggaaaatagatattgtaatattttggggcataactacaagataatacagaataaagtagctagatgcttgtgctgcactttggtgcaaaatctgtcaatgcagtggccactatgtagacatctcacccacaaatcctgccagatacctctgtaatagccaagccgcagacaagataaagaagacccatctctctctttcacagcactatagtaatgtttctagaaaattccatgtgcaagacatactttgtatttggacataaaacagagttccaagccatcgacaccattagggacatggaactgttctttggtgtgcggcccgggggcagtggggtggggggctgctgtcctgtgagttgtaggatttcagttactgtgaactttgaagcatctctacagacttccagaacagacccctagggggtgacgcagccccactgagaaccacaggagagcctgggagccacagggcggctggctctgagtcaggcgtgcagggctccagtcccagttccaagaagtcctggcaactgcacagccctggttaagtcactgaaccgccgtgtaccttttctttaatggagaaaacatcttctcccttgcaggatggctgaagagttaagtaagataacacagggtgggttcctggcccagagtgggccctcagtaattctattttctgtcttcttaggaccagccatgcttgttattttattttaatttttggagacggtctcactccattacccaggctggagtgcagtgacgcgatctcggctcactgcaacctccctaccccaggttcaaatgattctcctgcctcagcctcccaagtagccgggactacaggtgcctgccaccatacctggctaatttttgtctttttagtagagatggcatttcaccatgttggccagctgctcacaaactcgtggcctcaagatctgcccgcctcagcctcccaaagtgctgggattacacatgttagccactgggcctggctggccagctgtgtttataaactgcctcctgcacccctgttggttctatactatttcttccctctgtaaccgccttcttagagacaaaggatgttggccttgcactctgcagcacccctgtgggcacaggtttcctagaaactaagccccccagggctctgatctctctggggccctgcctagtttcccaggaggctccccagttgtcttatttcttcagagggaggccgcaaacatgaagggtctggaggctctggaagatgtcatgagcatcttaggagctctttttgggctctcagagacagatcagttcacagatgtgggaaagaaaaaataaaacatgaggcaaaaacttgcaagaaaatgtggacttaccaatctcatattaagcagacggaatgtcaatcttttctatagggacagggtcattaaatgcatattttttgaagtaattttaggtgagtccctttggctcattcattatagttatttattttctgcttctattctgaagtcagaaagatctggtgttcatgggttcaaattctggtgcccgcatagttccctccagcttccagatgggaaagctctctcatctgttttccagcccagccactccaaaacctcaatgccctcagctgtagaacagagggacaatgacaatatctatctatgaggattccacgtgctctttggatgttttacaaattcagcagagttgggaatgttctgggtggttgagatgacactaggtctggcttacttgtcttccagcaacaaaggaggaaacttttcatagggatttgaagcctaatgttcctgaaggtgacatggagtctgcttagtggatggattgttgagcaggagtcattctccagtcttggaaaaactgtacagagactcaactgcaggggaggaaaccaggatatggattaaataatgcatgtatttaatgtacatacctgttgttatgtgtatgtgtgggtgacatttactgaatatttactatgtgcctggcactgtgctaggctcatgacatacattagctcatttaaggcacaaacgtataaggtgtgcatgactcctgttcccattgtgcaaatgagaaaactgactctgaaggcatgctgcatgtacatgaaacaggcaggactcagccctaagtttgtctgaaattttcaaatctgggaaggaagcagacacagatagtaactaagaaactgctaaagtggtggggcccggtaacactacggcttcttacctatagaggtgagactcatgaaattccccaccctcagtacagatagcactgggccaagatcatgggacgcagctgaagccttcgcgcttggtggtcagatggcccatgctgtgcgtagaggaaaagtaccagtcattacaacaaggcctcaggagaccttattctctcaaagccacttcttgcaatacttggacatccacgatcctttctattttaaagacttctgtccatgctaaaaggtccagttccccaggagctgggaaggaggtgaggattaagccattgtgctggttgtttcccccttgcctgtgaacgcttggggcaacctcgggctcctgcctctgctagcttgacaggctgtgggaatcactgggagtgggtgaggggggtgcactgcaagtcagtgcgcacaaccctaggttctcttccaggatcagccccaagcagacctgaggaaaggcctgggacttggagtctgagtagcctcttgaggtcaccccgttttgctaagtgctccattgtttatgttcttgtgtcatgaataagcagaggccacagatttcagtccacagatttcaggagtgccatccatgcagttttatttgaattcaacctaatttccatcagaagtcttcattatcctagtaggcaagaactttccatgaattcagtgtctctctgcctattcccagggtttacctgaggccaaagagagagggggttatttaatcatgtcatcatgcaggcatttcctgagtcacccagtcgcatctggtcttctgtcatcagtccaggcacaggtcagtgctatggcctcctcattccaagggaaggtcaccttcgagtcagtcggcagctccctgggcctcactctgaagagcctgcgggagcacgaacacttccccactgagttgtctgtctgtggcctctgggaggctgtctcctttctggcagtagcagggcttagagcagggatgctttcacattcttcccagcaataggagagaaaggactgtgtggagcagaatactcctcactgctctggtagtttccagagttagacccaaggtaggaaggcagatgcctgcccagacatcagggtgcatatctttctgtcggggtctaccagcccttcggcttccctttgattctcttccctttccagtccaaatcatctttcctgagcagctcgttcaggaggctggaggtagggtgtggagaagacagggtgcagagaggacaaactggcccaggcagttcccctgtttttcttcctgccctgagattccccaggcctcagcttttgagagtcaaaaatccagaatctgcttctttgttctctggattcctgtgtgtcctcccttccctgaggccttaagcatggaatgctttagctgagggaacagagaagagccagggggtgccaggaatcttcagaaagaagaacaactgggtttcagagttatttctcagagacagcatgagaggcgccgattaacctccttgtgtctggaccacagtgcatttgctcattcatttactcatctagcttttattgaatgcttactgggcaccagctatgcttagggaatatgagaggtgtagagaaaacttccccttcaccctctgaaggtttgctgaaaatcaactgacaaaagaccgattagtaggagagaagacatacaaaattattcgaacgtacgtaacatggggaatcgtaggagaatgattatccaataacccagtggggtacagaagcttacatactgtatatacatttttcacaggggacaggggagatggggacccaccctggaggagacgggcagacattagggaaggtgaggggcagagctgcacagggacaaaggttgtcttattatgcagataatgtcccgcaggtaatctcttgaagctactctcagaagaacagatgaaaagtctgtctgggctggtgatgactcccactctcttctctggtcattgatctttcctggttatttgatgagatttctagggcaggggtttaagacaattgcatttcttttggaaaaaagaaaaaagaaaaaaaagctctcttggtcagatgaggatattccaaagagagtccctccctgcacttaggataagaggagaaacaatactaagctagaggaacgttgattctgaggcagcttctaaggtctatcagcatgtcaaagctccagtctttgggatatcattctttgagtcccaacagaatgttggtggaatggagaaatgtgtaaattgagggacactgagatcagacagcctggctctcccctgaggcctctgtctaccgagggggcttttttgggtattggccctgctgagaaggagttggagttgacctgccaaatcagatgggaaagtgccagccccacctcacagcccaccctcaggagacctgaccagctaagcctgctcacgaaacctggtgagagtcaaggagcagtggcttaacaacagaagatggcttttccagcctcgccatctgcctgatgaagagaaaaaattggtattctccactccagggctgactcccacatattctaaggtcctgagattccaggaaatgagagggaaaaaagtgcgtgattactccagagtgccgtccgcccctccttaatgtttccctgtctccttctccctcccctccctcctcataatcacctcatgtgcagctcttctgggaggatctgccttgggccaggtctgctgcagctgatcatatctgccacccaggtgtttgactttgaagtgggtatctccctggccagagggaaccaagcccagtggcttgccttgccaggctgccttgctgcatgagcagacccgtaagcgcatggtcttcccttggctgttcctggtgtagtcatcctttccatgtacaatgaattggagattccgggaaaagaaagtgatggtcttgttgacccaccaccaaggggacaattttgctgtgtcaggctatccccagaataattaccagtttttgttttaaccttcctgtctttgtcttttaaaggccaggaaatgcagcttcctaacttgcatgggccacatggtcttaacgttctcagtcttttcaaactcgttaccaacctaggattttgtgcacagccaaaaatactttctcccccactccctcttcaactggtcttaggctgtcataaattcctgctcatcctacagaccctgcctctttagtggagagctctttaactctacctccagattaggtaatttgttctcagagtaatcttaaggtaatggcctaatcacctaagcaaatcagtcatcattacctaggggaagacagaacccatttgaatatttagatgcattaattggtgcaaatattctagagtgtttaggtagcaaatgacttaccttgatacctccagtttgcattttatctgacagaaaagaacaccgagagcacactacatcttacagttagggaaacctctttgcctttgctgtataggttgaaaacaggggtgaaggtaacttcttagtaggagacttgaggcccataactttcttctatgacccttgctcttctccaatatcaagtttgcaggatgttattaggattagcaataaagttttttaagcttctagcagacacctggcacatactagagggcttcataaatgggattaattatgattattactactgctatgattactatgtgatataattcctatgaatcaagttataaaataattttcttttttttttttttagagacagggtttctgtcccccaggctggagttcagtggcacaatcatagctcaatgcagcctcaaactcctgggctcaggtgatcttcctacggaacttagactataggtgtacgccactgcactcagctaattttttaaaactttttatagagatggggtctcactctgttgctcaggctggtcttgaactcctggcttcaagcagtcatcccatctcagcctcctaaagtgctgggattacaggtgtgagccaccacacccaaccataaaataattttcatcatggaataagtcttaggtaattcggagacatatctggtgagcagagaaatatgtttcattaaataatttacttggaagccaaagcatgttcaaacttatcaaactaaaatgacagagccttgaggtctggtgtgtgtgttagggagggccggtggggaagtgctgtaactggccagattcagatacgactgatgggcctttggcaaactcaggggttccaggccccacccagtcaggagggttagaaacaagatcacacctctccatccctggtgcccattgctccatgccagtccgtctgtcatctctcacccggtaggatgagcacgcatgacccctacacagtcccccagacacaaaccatgcatcccagcaacttcccctgtagatttttccaaagcacaaatctatttgtgtctcacatccttccctcccctgctgagaaccttttcattgctctctgttgctcttgggacagagtccaaaccacatggatggcagaggtagatgtctggagagagcaaactccctgagaataattgatatctccatccacattgcattcaaccaccccgtgtgtgttcacaagtgcctgcctgtgctggtagcttctctaggtacagggaatacagcagtaaacaaagagcctcaacctctagttggatgaggatgaaacacaataaataatataaaatgtcatttaatgtcaaatattgataaatgctatgaagaagcaggtttaactgctgacaagaaaaccagcagaatattccatgtatcggatgggtgtggtggcttcagcctataatcccagctactcaggaggctgaggcaggaggactgcctgagcccaagagttggaggctgcagtgagctatgattgtgccactgcactccagcctgggcgacagagcaagaccccacctctatttttttaaagagtatttttaggtcaaagtcagtttattccctacagcagtaagggagaatacaaccttgatagtcttagaagtgtctcagaaagaggaagccagggtggatatttacagcattttggagtctgggcaggtcttccaatgtggggatctggttgggattgggacgtctcctgagtaaagcaatagttattatctttctgagcacgaattttctggaactaatagcaaagtcatgaaagtcatgttgatggaggtggccttggtcccagtcctaactgttaagctgcaggatacaaactgtctcaattctctcagggctaagtatgcaacagagatcaccccaggtcattgcctggggatgttctgtgtaacccccagcctagagttgccagatttagtaaaccaaaaatattttatctgcctggcatggtggctcacacttgtaatctcagcactttgggaggccaaggcaggaggattgcttgaacccaggagtttgagaccagcctgggcaacatggcaaaaccctgtctctacaaaaaacacaaaaattgaggcatggtggcacatgcctgtagtcctagctactcgggagactatggtgggataattgcctgagcctgggaggtcgaggctgcagtgagccatgatcgcgccactgcactccagcctgggcaacagagcaagatcttgcatcagcaaaaaacccctttatctggcaatcctattagagtgctgtcagtttttcaaatgaactgtctgtatattgagtctcgtgttccacaaggtaccagttgggccaagctgagctctgcagctccctggagactgcggcacagggtggtgttcagttcaccacagttccctgtcagctctggagggaatttgagtttgggagctccacaggggactcaggtccctccagggagctgggtgtgcttgggcaagttctttgccatctccgtgccctgtaacatgaacctgacagtcagaaggtttgcaggcatccctccagctctgtggactgcccacgtggagattttagtgctattttatattaaataagtcataaacatccaactcagagatgtttggcaactatatgtggctgttctattattattggtttggaaatgtttagaaacttgacccccaattttgttatggtctctttagtaactgttattaggtggtgacctaataagaaattattaactagggagctataacttggaagcttataattttttaaaggacattgatttgtgcagccctgattaaaatacaatgaagcccgaggcttaaatgttttcttctgaaaggttgaaagggtgggaattgactctaaaaatgtattggcttgaaaactttattgaaataatattatttgaagaactttgtgagcataaaatgatctgacaaaaacaatttgatgctagctccggcagcctgggaaagctgagggaatataggtttcttcagatgaagtctggaaaaatgcttccagattacctcaagggtgaaaagaaaattattattccattccacaaccctgctaattcttttcaacatcaatccagtcaagtaattagaacccaaatggaggaaacatttataattgtcatttactctactttaccaaaggtgacagttccgagaagctctgacaggacaaaaaaaaaaaaaaaaccaaagtgattatgaaagaaatgtgtggccaaatggatcaggccttcctacactggttcccagaagccagtcacaggcagcaggtagggatggttacagattaaaataggcctcctcagcaaagaaaatcttctgctgcggccttgtcaatggtgtgataatgtgagctatttctcctccctctctctcaccacagacatatatcatggagtgctttgttatttaaaagcatgtataagaaagattaccaaccccccataccacagggaatacttcagaagtgaaatatgcaatcatttaggggttacatttaaaatacctcctccccttttatcattatatttcttcacttgcactaggctaaaatatgaggtgtttctgctgctgtgagaatttttttttctaatttctgaaataataccatagcttggagattaatgttcaggctttaccaagattataacaaatgcatattgctttgatctaaatatttctccaaaggttgttgctgatcattctcccttgcctataatcttctaagaaagcttttgaatttgccagcctgatacccagggggacaagagtgcagctgccttcccttccttccccctcatcttcccgaggatactctgttctcagttttgcccaaattagtcccaggatttcagttgtcttttttgtccaacattccatcatgcaattcattaacatcttcacatgaaatatttaacagatgagttatgtcctaattcacattgcagttttaaattgttattcatgtggtaagtcatttatcttggacaccaacagacctccggaatgggctcacatttgatgtaaagaaggttggagttattttccttgatgctccagaacagtgccctttttccaaaccctgggttaatcatgaaatattcccaaaaaatgacattcagattcgttgttagttctacttgcagttaactgttttgaaaacaaacagaagaaaacatttaaacaaacgtggcttgggtaatggctattacagttgaccgttaactaaggcaagttggaatccaaacatgccaggccttgttactatcactgctagcaatctttgccatggtgcacaaagaaataaaaattcagagactgtcaaagtggaggtgagactggataagagatattaaccaagccatgtaaaaatacccagtgccctgattaagaaatatgaccagcaaggaagctgatgatctggatgagcatttatctgtacaatttgggttttgggaaaagtcactctactcctaagagatgaaatatatgggaaatccttagcaggtaatttatttattattaacttattgtagttgtattccctctaataaaactacaattttctactatattcctacctatggattggaatctattaggagaaaatcttctgtttgtagaacaagccagtgcaagtcagctcttggatctgtttctctgcctggacaccacaatgaaatggtaattgtccacatttgcaattgtccagcagtagccaggtcattgagaagttttgtgggcaggtggcctgattgatgtgcacaggaagctgatggcaccagtatcatggacagcagtcttcttgggttctgtaccctgacctgtctaaccttgtcctgagtatgcatgaatgatcacaattccagaaggggtgggtgacaggacatcttctgttttcttttgcttttaacagagtggtagaagccgggtaatttgtaaagaaaaggaattcacttcttaaagcctcttctcagaggctgagaagtccaagttcaaggggccccatgtggtgagggacttgctggtgggggctctgcagagtcccagggaggcacagggcatggcatcgtgaggggactgagcgtgctcactcaggtctctctccctcttcctgtaaatccaccagtcccactctcatgataactcattaatccattaacccattaatctattaatagattaatccattcatgaggacagagtcctcgggacccaatcacctcttaaaagtgccacctcttaatactgctgcattagagatcaaattttaacatgagtttcagagaggaccaacattcaaaccatagcacaggttttgaatggtggagcacacctttccttaatcctgaaggaaaaagattaattctctaagagcctgcttggctgatagcatgattttgtaatgcatttgctcactgatataacactctaaggaacattcctaggagtggacagtttgcattggtcatagatgaattttctgctcactctcaacataattggcatgaaaggcatattagccatgaaacataagaataaagaataaaagctctaggagcaagtcataacatgaatgatgacaacactatcaactagttagagtattttaatacccgtgattttatttactctcactgatttttgtcccacaaaaattctgttcagaagccagagccggtgcaactctattggtggagacagagaggtaaagtgacatacccaagggtacacagcagtggtcttaaaacgggtttgcaatcagttctcgcagcaaaacaactcctgattggaattcactgatggtggcaggattgtttttctgccttttggatgagctctctatgtgtatgtgaatatattgtatgactggagggctgggcaaatggaagtaggggtgtttgggtgagcttgtgtgccaggcatagtgagcactattttacaaaccagatctgtgcccctctagtatgttgcaagttgaggccaaccccacaggaaattatttctaaatgaatacgatatgagaaaagttgttttatttctaattttatatgttttatttctaattttatattttgtgagtttcagattacacttgaatgcatgtctattaacatgatatgagatgcatgcatgatttcatcttgaatgcatttaaacataatagcactgcaaatgtaatttgtagtctcaagttttataaagcaaaataaataaatctggagggtggttgttgcattgatttctttagggttcattcaaactcatttccaacttccccttgcaagtccaggttgtctcacgctggcagtcctgtctgatctaaaccccctatacctaagtcatctcatttcttctacctctggggagtggtagtatggacgggtttgtggagaattgtaccttccatccttaaggagtgctagggtccatttcttttctatggttccttctgggatcactggtcatcgtccagtagaagtctctgcaatgatggaaatattctagatctgcatggtccagtaccgtagcctctagcaccctgtggctacggagcacttgacatctaactagtgcaactaaggaactaaattgtgaatattatttaattttagttaatttttatttaaatagccacatgtaactaatggccactaatttggacagcacaggatcagagcattcaaggtcagctgcctgtccctagattcaagcatgccgatcattggtattctgcaaagcaaatggtctatgtgttttggatgatgccctgcattcgtttctgtcagctctggggatgctgaagtgtgaatctctcttcggtgatttgactgccctccccaggcctgtacccctggcggttgtgtctctcacatctttttctcaatacacctatcacccagcacatactgggtttctgataaacatgggagaaaggaatggaggaagggagggtaaaagtagataagaaggaagttagacagttgggaaaagaggaagtctggaaggaagatactttgttgaagtttcgatatctgtagttaagccctcttagagtattgagaggagttgtgagaacagtcacacagatagttcaaaagagaggtcagtgcttcagattcctgaatatttcacatgaaaggattctgggctctttgagatggcaattcttataacaataattttgctgtcttggtttccaaagaccatcccagtatcttggggtcgctgtcctaggaggctcaccccatattggcacatggggaaggatcctatgggataatattttctggatcggttgtgttcctgggtggtgagtaagatatcaccagatgcagttgtgtaaagggactttgtctctatccatgtgatgaagattcccagcagggagggagccctgggacatctgtaatcaaattgaagtaaggagcactgtgacctccggggaaatatgttgatgattttctggactgtctaaaacattacaaaccccaggaatggtgatttttttttttctgtaactctccttgggacttgagtttcacaaaagcatttgctgtctttgttttccttattaaattagcaagactgacttaaatcaatatactgttactgcttgaaatgttgctgaaagaacaaaatagacgggcttgacaaatgtctcaggttccatttaggttatgtgggggctgaagggagagagtgggactcactgaagtagtcgtgttttctctgataaaggtcaagaaaagaaaaatgtggaccaaaactaaggaaaatagtgaaaggaagctacacttctgtttgtggcttgtggcaggtgatatttgtttttctgaatagagttggccataggattcccttaagcatttttgtttatttgcttgtttgttgggggagagggttattcttatttttttttttgttgccttgttttttgcactttaaatcattttcacgctcaagaaataatgagctcaatcccgttactctcgatcccttactctcattctcccatttcccattttataggccctttccctagcacttcctctgcgagctttcagagtgggctttctaaaaatataaacctgatcctgccacttcgatactaaagaccttcaatggcaccaacggcagatgtcagaatactttttctgtaaaggaccaatagtaaataactgaggttttgtgggccatgcaatctcagttaaaactactcagctctgctattggagtcatagacagtgtgcaaaccaattagtgtggctgtgctgcaagaaaactttatttacaaaaagaggctggatttcaccattggaccaatctctggcctacgtactcttgaagctttggcctgacattcaagaccttttgccatttgacctcagcctgaacaactgggtccccgttcccattcttctcaagcctccaaacaaatgatggtctttaaaaaggttctctcccttcccctcccttactgtttcctccatttggattgccatcttccctggcttcttactgttctgtgagtgggctctccatgcctcaccttacacaaagctctcaccaggccaagtcagccccattctctgcacgctccagttctttatgcctctagtgtagcttttacaatggatctactcctcaactggacgtggagggagcttagtacccagtgtagagcttagtactcactgaacaaatggtcgtgaagttgatccatcaatgaaattgtgagtcccttaatcataggagagtatattaacttatgggtaaaagaaaacactgcaaaccccagatatgccacaggaagccaggggccagtgttactggaaaggggatgaggtcagctagccggaacacagctaggtcaaaactagcagaacaattgcagccaggactatccaggagcctttgggcaacaacctcatggtgcaggcaggggtgtgagtgaggagagagggaagcagttctagttcagggcatcaggaccaggacgaggatgcagcctgctggagggagatcagagagaagcagcctgcatgattaatgggatggagggactgactcatgaggaaagatgaaagcgccccaaggagctggggtagaggaccgacaggggcagatgagaacagactgcaagtatgtgagatggataaacacccagcggggagcagctggcttcatcagggaggtgaagatgagggctccatcagagaacgggggtgggggtctcagaaagggcatcaggagactcatggaagctcaagagatgacaggtgggcccaggacagctctgggctgttggagggagaagcaccatggaaaggctaccctggagtgactctttcagggagtcagaccctgttttgcaccctgcaccctggcctgtcaggcatttggaagatgagatttatttgaaatgcagtcaactaccatcagactcaaaatcagcttctttcaggcattctctgaaatgttctccaatgctgggaagaacagcttttgtgttgtgtagtctggccacgtggcccacatcacagtaggtccccaacagctgatttactaaagccatcccccaccttggctgtgcgtgagaatcatctgggacacttttaaaacatacccaagccagccacatggctcacatctgtaatcccagcactttgggaggttgaggcaggcaggtcacttgagcccacgagttagagatcagcctggctaacatggtgaaacttcacctctacagaaaatacaaaaattagccaggtgtggtggtgcacacctgtaatcccagctactcgggaggctgaggcatgagaatcacttgaacccgggaagcagaggttgcagtgagctgagatcacaccactgcactccagcctggacagcagagtgagattctgtctcaaacaaacaaacaaacaaacgattcgcataggtgttactcttctatatttctctctaactgctgactataatatcacttgaaagttttttttaaaaagcaagcatttacctatgggtcgtctgtgtactcagcatcttgctggaggcaggggtccagcagggagcaagaacaggtcctcattcttgggaaggctgtggtccagagaacgaaggacacttaaggcagagcagaatgagcctgggcaccgacatggtgcatttcagaggcttttcacgttctgcatgttgcagccgtgcactgctctagtctttatcctagagtcggaaattctaagtgcaaacacagatggcaaatctctcccaatgtacacacccagttaacctttactctcagggctggcttcaacaatttctttaggaagtagaaatgcccttgatagttatcagggtaacaacagcccaagacctttatgaatctccaagttcctgaagccagcacaacaatgattacccaaatgggaggtccagtatagtggcacgcaaaatttttagagtatttaagtgattttttttcttacaattgtgtatttcttttgatgggtgttccagttttatttaggttgaattactgtaggtctttaagcaaaagaaagaaatgtggaaggacaataagagtattggtggtatgcaaatatggtaaaaatggggaggttgtgtgcaacagactacagtttgcaaaactgcactggggtaaatgacgtgctccagggaattcagtattccctgtagtctcattcttctgaacgcctctcaagttttcccaccatctgaggagcattttgcccttaccattttacttcctgagatggtttcaggtctttcaagtggtttgggcttcatggagaaaaataaggtgaacttcctcatgttatagttttgaggttccactaaatttcacttcccaaagtttcaagtcacattcttaacctcttctctttttggctgtttctgtcactagaactagcattcacagttgctttaggaagcttttcacagacaaagaaaaaattacataattttaccagagttccatgggagagaagaaccttgagatgtggactctaggaggccagttaaactaagacacattatagtaaagtgactcacttctgaattctagcctcatgacaagtgcttttcaaatgttacgtctcaaaaacacatgcagagtacacattttagacatgcaagttcaaacagtaatagctgacaggaactgaagcaatagtgatcttttgaatttttttttttctttcctcttctcagcttgtgttggggtgggggtaggggcagtggtgcaagcatatgaattttagaaatgccgaagtaacatgtctccaaagagcgatctgcactgtgctgtttgttttgtatcgagagttctgtgagtgcaggtaaacttgagaattctttacctgaaagataaaatgttttagttgtatgcttcactgtacattttattttatatgcttatatcagcttcttgccatgacggataattttcaacgataatcttaaataattgtgtaaagggatcactaatgccttgttttatttataatttgtcccagctgtaggcattcagatgaaacttgaatttttccaaaggaagttctggactgccagcagacaggtaagttataatcagcatcttgaagcattagcgacactgttattatacaggtgttcccatttgggtacctggagcctgaaagtgccagatttccgatgaatgtttgtaaaatcaactgccggctgctcagattacctttcatttcactgcaaaataaagggctgtcagcatgttagacaccacatgctgagcaaagcagggaatttgctcctaggaacagttttaattgtgggatcaagatagtgaccttccaaaggagtttttcttttaagtattggggccttttgtgagattttcattctgactttctcctaatcctgtggtcgtgcctggttacttacttgtgaatctcattatcaaaatctagaaaccctttacgtaactagtttctccaaaacatgtatctgacttctttgttcacagggtctaccttggagaatctgggaacattgttttcttttcgctatgctctctgtactaagtcatctcagtggtatttgttgagtaatttggtagaaagggccactgataagttgcttccatctgaccaagaataaatgttagaatggcttatcatcctttaaattaagatactttaggaagctataaactaaggagatggacaggggttttttaaagtcactgagaattaatgaattttaaattaattacataattgtatttttagttaccaaaagatttgagatcttaaaaagatatcattactgtttaatgacaacataaagtagactttttttttttttttttgagatagtcttgctctgtctcccaggctggagtgcagtggtgcgatctcgactcactgcaccctccacctccctggttcaagtgattctcctgcctcagcctcctgagtagctgggattacaggtgcctgccaccacactagggtaatttttgtatgttttagtagagatgggatttcgccatgtggccaggctggtctcgaactcctgacctcaagtgatctgccctccttggcctcccaaagtgcagggattacaggtgtgagccactgtgcctgccccaccccgctcagttgtttcatagatcttttattttacattactacttggaattgatactgattccagagatagtagacaagacacatcatggagcattccttttcaatgaaattgggtatttgaattctagcccatgacttggatagcttgtccttaagtagctcagtggcagccacagcaggcactgggatgcccaagtaacatagtaacacatttccctccactttttgccttcacagtgtgcttccctggatggcaaatgctccatcagctgtgatgatgaggtaagacggcctcctggtcctgtttctacccctgtggatagaaggtgacagatggtgctttatgaccgagggaatgcccttataaacaaggccaggttgacgcattgtactgggccaatctaaaaaaaaaaaaatcatttgctttatttgctttgtttctttttttttgttccccacctcccatcagtttatgacagctggaaatgtgctttaaatgtctcatggatagcactattggaattttgacattttgtaggaaataatacaaactcctaactcctactgtttgaagctcacattacaattctcaaacctttttctacatgccttaatctctttccatccttgcaacaaccggtgaaataggtaggacttgttgacccatcttgcagataagaaaaactgagcatcagagaaattaagtgattcagctaatttcatgtaataagcaaacaaaaaacctaggagttaaaaactttgaaactcaaaatgtttctttgtagcatactgcttctctcctacaaatcttttcttttttcttttctttctcctcttctgttctctctctctctctccgtctccctcctctcctcccctcccctcccctcctctcctcccctccgttcctcacccctctcctcccttcccctcccctcccctcctctcccctcccctcctctcctatcctttcttctcctctcctcccctccgttcctcacccctctcctcccttcccctcccctcctctcctctcccctcccctctcctctgctctcctctcctctcctctttttctctctctctgccttttgggaggagggattttaatcctacacatgcgcaatggaagaagaaactatgccactacccaaagtgtttccatctgccttatgtttttataccttgccatcccataccctctgccccacgttttggagcaggcagaagcatggtggccttttcacttctcctgaggtagcctttctctctctgcatcagtgaaacagcagtcaatatgtaaactagaccttataaatagtcacatatttatattccttctgcttatcatgaggacttaagaaatcctaaccaaacaatttcaacccagaaaacatagattaggaagtagatttcaaaaaggtggacaaaggaaaaacaagtaaggaaatataaaaggaagtccaggatgaagttaaaacaaaatgctcggtcccagaggatctggctgctggttagaaaatcataatcattgtatgagtcacagtatcaaaaaaaaaaaagccagtcagcaaagttttctgcagaagcccaagtttctgtgatcatcagatcaaaactaatttccccttaggaaagaataccctgtgaagttgtatggtccacacccttttcagcaagttcagggataatttttgtaggatagtcaagtgggcctcaagcctctcccatgtctttgagacatttattgtcttattggagtgctcagctcaagaacaacacaactcaatagtagtagtgattaatcagtgtctcgaggccctgtgttaagctcttcacttgcacagtgggtataattatgaatcccagttttacagtaagaggagtgaggatggttagttggttagttggctgattgtacagatggttggacgggtggctcacagctagggcagtagcttgaatagttggttggctcattggttggttggttacgtagttggtcgattgattggatagatggttggatagttggttaaacaattttataactaaagccagagacagtaatcttcccagaacccacactgcctcagtgcatccttatataaaaacaagtggaaatggatttccacttagagttggaaacatccaatacatgttcattcttcaatgactgctttcacaggcagtctaacatggtggttaaaggcaaaactatttacactgactagcttcaagtcgtgactctgacagtaataaaatgtgtgaccttgggcaagtttccaaatctttccatgcctcagttttctcaactatacaatggggatagaaatatccacctcacagagtaatggtgaagaatgaatagataagacatgaacaatgcatggtatggctcctggaaatgataagcattcaataaatgttgtttataaatttaaaaaaaaacaaactctgaagatgttttcttccatgctgtggtttcaggttgctggatttgaaacctcagacagcaatggtatatacactttgggcaagtgacagtttcccctgggcatagtaagcacaggctacgacctcttgctcactgctaacaatgttcttttagcaaccattgggataaacccctattcaaatgtcatttaaaggtccacatgctttgaaaattaagccttgaagttgccctgatttctgaacttgatctgatgctcaaatatcctgagtttgtactttgaagctgtcatccgttgtcctctttgactcttaaattttggttccaggcaaccaattgacactgttttaaatagaaaagtcagtcctgccttctcaccaaggcccctttccattgtttcagcagactcttgccatgtgtcattctcttttttgtaacttttaattaggcatatgagaccatgttcctctcccccaactgccctcgaatgatcaggtctccattaaaaacagctgtgggggctcattaagttcagtggtctgacttctccattgcacttatgacctggcccaactccctcgggcttatcagacacacttagccttagatccactccagcccctttgtctccccagtcaatgcactctctgggccttggcaggagtgctgtggctggtaggtggagccagtgtgccagatgctctgccatcttgtagaggtgcatctttggttggcccagtcagaacctgagccatgtgacttgagggcctggccatggggctgacttttaaggagctccatttcacccagggtgaatgttaacttccaagccattgaggcaacagttcacacactcatttcttccttcaagacatctttaccgagcccttcttaggcacctggtgcctggctgagcacggggcagtcaatgggaagcagtcagaaaaggccctgctctcctgaagcttaccggttagcaggagagataaacttatatgatcatcaattgtggtaagtcctgcagagtaaactgacatgcggtagtcagcgaaggcttctctgagggggtaacatttaagtcagccaaagaaggagatgatattgaagacaattcctgaagcctgagaagagctttgcaagcagagaacaccactgtagaggcaccaaagtggcaaagggtcattgtggtcaaggaaaacacagttagcattcaggacagaagggaggaaggagggccacgttcacctctgatctcagtctgacctgcaggtgctagtgtttcctcactgctttcagtctctttctccttttccactcacctgtgcaacacttctcatctcctgatgagagtaccaggagttagcaaagacggtggaaggtgagaaggtgtctcctactgaggcattggaagaggtgtgacggcagcgagagaatcgaaaacttcatgatcaaagtcagctctaccctttcttgttccaaaggaatagaggctaataacccttattaaaaatctctaagacttttctaaggcttgtaggcatttcctctggcatcagaaagacctgcttgaattatgacagggcaacgagaagggctgcctccaggcagccaggcgcctgcctgcatgttggactgcccacctcagccagagggtaggtttgaggacgatttgaatagcaaaggaggacaagggggcacaggtgacccctaccaagtgcatctttcctaggtgacccctctgcaataaattttttcaaaagacagtgttttgatatgatcattagttaatgcaaagatagagcaaatgatgtgaagtaagtgtcaagcgtattccacaatggaaatattagggattggatcatgagacctggagaaaagtagcaaggagtggcaccttcctgtgcctgatgtacagagattcaggccccaccctcagatgcaagaacctagtgtgtgtgtgtgtttctctctccctctctccccacaaatgaagacaacaggcagtacaataccgggtttctaagtgagttgtttctccaatcaaacaaaaggcatccttccaaacaaaaggcaaaaagcagcaaagctcagccagtcagccgggacctcctgctatgaactatgtaacaacttccgtttctgaaaaactgtacaattgtagcattaggatacttgtaaaaatcacacatcataggtgaccaataaacatttgctgagcagatggaagcctgtgttcttggaggacttactatgcactaggtactatgctcagtactttacatgcaccctcccatttaatctcagcaacattatgaaatagttggtgctatctccatctttcagatcagaaaacagactcggagtgttagaaagactttgtttgaggtcacaccgacagcagatgtcatagtctgtgattctcaaactggtgtcttagcctttgggctagtaccccttccagtgtacacaaggttagtactgccatttgtcactcccaggcaccctgcccttccaatctgtgactgcccaattcccatggcctgggtttgggctttaacttcaggtatctacctgatccacctctgtgactaagaatcagacttctctgagtaatacggagccatccgaatagttgcaggaagatgccttttttaaaacatcaacttccctctgtgctctccaccctgccctttattgctgcctttttaaaaacaacctcatccccagatgttttgccaaaggtagttgtggagtaggtgcttacaagtgtctgtttgaactcctaatttcttcaagctcttcaacttgttagtgcacccttggggcagggtgacagatagacatcttctaagatgttgggcttaatttgggaggaaagggtagcacaagcgagggaaagctgagaaaatagttcccatttccttttattggacaggccatatggagaagggaattgaatattatttattgtaaagtgatatggaaaaaacagttgatcagactggactctagctaattctgtcctaatttatccataaacccagcactctgaccccctaactccagtgggctcactccactgcactctacttctcaataataatttaatccaagtggtcattgacagggaggtctgtttagaaagtcatcttgtcactcaatttgccttttaatgtttacagttagacaaagtaacagcagtgtctataaagaaaatgtggctgggcacgatggctcacacctgtaatcccagcactttgggaggccaaggcaggcagatcacttgaggtcaggagtttgagagcagcctggccaacatggtgaaatcccgtctttactaaaaatacaaaaattagctaggcattggggtgtgcacctgtagtctcagctactcaggaggctgaagcaggagaatcacctgaacctgggaggcagaggttgcagtgagctaacatctcatgccactgcactccagcctgggcaacagagtgagacttggtctccaaaaaaaaaaaaaaaaaaaaaaaaaacaacgtggccccctttggtggaaatggaagcttaggcatgttgtccttcaggatccctggccagttctccgccttgttctcttcccatcattgtttgctaggatgtagagcaatcttaccaaaatgagtggttcattaagtatatttttagactctagcctataatggacatatttttttcttccatagattattctgtagcaagttgtggagatggatagaaaaaatccccctaaactatgtcttggttcagatattagctcaagaattgctatgcccagggagtctaggaacctataattggggttgataccacttgaccaaactgacccagacgtcagtcacttttattgtttttacttgctttcagccacaataataacaccccagacacttggtacattgatttttctgccatttgttgtggtttcctttggtagcaggtgtcagacaagatctgtcttaggtatccatagagattagatataaatataggtatagatatagatacacacacacacacacacacacacacacacacacacattatataaagggattgcttttttcaaacaagcaaagccttccatgagcaggcaaaatccctagaccctactgtgtcctgctgtcttttagaaagtaagggtgggggtcagccagtagaaagagtgtgggctttggagtcccatagcaatggactcaagtctcacttgtgtgtgtgtgaccttggagaagacaacatctcacaacagtccccagagtgtgatgttccccttcctgttgtggggtggggggaggggggagagatagcattgggagatatacctaatgctagatgacgagttagtgggttgcagtgcaccagcatgtcacatgtatacatatgtaactaacctgcacattgtgcacatgtaccctaaaacttaaagtataataataataattaaaaaaagacaacatctcagttttctcttctttccaagagaaaaattccctgcttgatgctgtgaaaagtgaggttttcatgagtcgatgtcctcctgtagctgccatcctccttattcttcttcttacattcttattgttactattattagtgacagtcatgttttatgaaaaacttctttgtgtgatagttttcatctggtattctcccaaggaggccactcccctatttttgcagcttggttttccaagttctgagttaaagcagtgtttgcccctgctccagagctctcagctctgttccttccacaccagaagtgggagtgggagggagcagggcagacgcctgagaagtgagtcttctgatctcccttctactggtgctggctgttataaggagcattataaggagggcctcgttctaagaagaaaggtcagaaaaagaaccaaatgtttacagcaaataataaaaagttattttgaatatttttctctaaataaagtggaaagtatgaaactgtgtttattttttaaataaatttaggttatatttgcaattgtactctaattttccaaagaaacaaatggggtaaggggccaggagtttagtgtttctgataagatgataaaatagcacaatatgaaatccttcactttatattttgatttttctcagaatgaccacaaaaagggtaaaatatagtaaagagtttgatcaattttcctagggtacttttcttagtcctttgctgttgaaattattctctttggaagtacagctcatgttttatttgtagcaggtattttttcatctttctgcctctgacagattctaatgtgccaatggcttcctgtgcgattggagctgtttaacgttactttcatggacttcatgaaatcttgcctctttgtcaagattttcaattgactttataatctatttgccttgtacctgtattgcattgctcaatatttacagtattaggcaaacagaaagatattgaccaaagatgtaggtctaatagcaagagtactaattagttagagatgttggagtagggactaagttttaactaggagtagaggttatgatgatttgtggccttatatgcagctgtggggatttgaatattgacagtatctgaatatggaggccacttctgtactcaacatgtatttactgactcaacagaggttagccgccccttgcttcattgtctgtatctgcagaatgagcatcatgatgttacctgaaagggatcccaatccagaccccaagagagggttcttggacctcatacaagaaagaattcatggaaagtccacagagtaaactgaaaacaagtttattaagaacataaagcaataaaagaatgggtgttccataggcagagcagcctcgagggctgctggttacccatttttatcgttatttcttgatgatatgctaaacaatgggtggattattcatgcctctcctttttagaccgtatagggtatcttcctgacgttgccatggcatttgtaaactgtcatggcactggtgggagtgtagcagtgaggatgatcagagtttactctcatcaccatcttggttttggtggttttagccagcttctttactgcatcctgtttatcagcaagatctttatgacctgtatcttgtgctgacctcctaactcatcctgtgacacagaatgccttaaccgtctgggaatgcagcccaataggtctcagcctcattttacccagcccctattcaagatggagttgctctggttcaaacacctctaacatttcccccgtcccttttataagaaaacccttaatcctaagggttgcagagggataaagatgcatcttctgtaacttcttcaagctgataggggcaatgccattcctgcctaactattgggtctcttgcattcagggtagatagagaggagctcagtcagaaagcattggtatggcaagggccgttcatgactccgagttctgacaaaagatgatatctagaagattaaaaagtgctcagtgtaagaaaacatttagtaagcttgtccagcatttctacacaaagagtacaatagcaacgtattccaaaacagtaaaacaaaataagtaaaattatcccaagtaaactaaataaggcgttccatgaactgggcaactattggaaccaagctgatatgaggttgctagctgattccaatacatgcccagaattagaatattgatccagatttttacattacccatccctgttgtttcttctgagcagcagtcaagagatcactggttggttcacaggaataaacagggttggcctaaattacagaaaaaaaccttaaaatcaactgatgagactagaacttaataacaggttataccacagttcttgaaacataattgttctctagtttcccatttttgctggagacaaatcatagtaagactaatttgctttattatacttggcctgattatttgtatacagtgcagcaagaataattatttttcacataggcttttaaatttgtctttgatgaaattttgttccatagagggaatctcagataagacttttttttaaagccaagcctagccatgggtttgtaccccagatatctatgagttgagtaaattcttctcctcttgaggtcccaaaataacttggggctcctgggcctttcagaaggtgacattctttacttaccacaggtcaggaaccctgtacagggactgtgtagacaaggtatgaggctagtttttttcaaggggctcttcttggctctctaagtcaagtttgattccttaaaggtaaacacaccattccagtcaaagccttggtaaaataaccagtttctccagttgtatcctattacaatagaaaagagattcttactgcatttatgcaaataactatattgccataagttaagatactctcaaatagtttccaaattctggaggaaccaggtagagagaaacaaatattctctaaattttttcgcagaagtatagtttactcaattgttaaaagctgtaaatagctcaaaagaaaaattttcttggccctggaaaacaaaaaggatcagcaatgttttaagcaaaaaagtaaaagaaaaatattacttcagttttttattagttcagttcatgcagttgactcctattctgcttgaacagaactcctgttctgtcatgaacatttcagctctctgtgagagtcctgaaactttcttcctctattctaatgtcacaatctccaacattatcagaaatctgcattcaatagcactgtcagagttctatagttgattataaaccatctcttgaagaagattaaaacaagacaacagttgtctgtggatgataaaaagtcttaggacagccactattaaagccacaattgataaagaaatttggttacttctgtggcatccaaatcttacataacaattataactattaataacatacagtaagccatgttagaattataggacttcttataattttggaacacataccaatagcacaactatataaatatatcccaaagaaagccaaacactgtttcacatttgataatgcttcctgttatgatttttataccaaataagccaagttttacctttgcattagtgtactattaatgttaaatccaattcttaataaaaccttatagacaaatgtattcagtcttaatcagtttgaccacgaggtaagattttcataaaccttgtataaccctttacatttttttgtgaaagagcagatcagtgttctaagaaaaacctgttgtgcttttattccagtgtttaatttacagaaaaactgaatactacctctttaactttagtcaatgtccacacacagaatttcttttaccattaatttttttacaaaccttccacaagtcattcaaacttttagctttatcctaacttaaaacaatcctttaaccctttaatctaggcagaaaaaatccaccttccaaaatatattctacttttcttacacaccttgagtgtagaactgtttccttggtggtctcaaatacatgttacagtgttaactcttagcaacttttacttttggtaaaaaccttggtaagtaagggattttaattatgtactaggtgccgagcctaggacaccataaggtctgactgtttccagcataactagagggcatgactctccatatgtccccaggccttatctagagtctaatgctgcaaaataggtaagctgaacaattttcaaaaatcaaagaagcagtttatgaccttaaaatatttagcaaagctaatatctgacttgcataatttagaccaaatgtttacatttttgaaggtatttttattttatcaataatctttaaaactatctttatttcccaaagattactaaagtcacctgaactaaaagacattacactttttacttttctgacaatatttgatttaagcacctattatttttaagccaatgaatcaaagctcttttatattacacatacaacacatataaatacacagacaggcagaagataaaagactcattccctaaaccaggaattgaaccctgaacccatgctgccatggtgaaaagagaaagcacagtcacatggttacaaggtcaagtttccaaggacatacaagacaatagggaaatgtcatccagttcttttttcttttttcagggatgtgcagcaaagtttttaactgaccagtttgttgcgccttcttgaacagtggttttatgggagtcctaggctcgcactgtatcttagagtacccctcttttatgacagaacaatacagaaagacacacacagcacaccagattcactacagtttaagactagcctcacaaatcctttttcccatttatcaaaactttacagaggattttttacctaacagaggataaatcctttacagagaatttttacctaaacagtgatttttaccattcattcaacccattgggagcgagggggagagaaagaaagagaggaaaaaggagagagagagagaaaggggggctggggagagagagaaaaagaggctagaagtctgactggtaagaaatgtttacccttttattggcatcccaggcttctgggttccctttccctgagcagccgtagtgaccgggctggctggaccacagccctgggagccaagccgcaacacaaaggaaaatgattttccattctggccagagcaaaatacatgtgacaaaacacagacattagcccctttgcttagcgcccagtatcaaactggcaaggctcatacttgcccccccattgggtcccatcattgttaatccaacctctgaccaggagtttcaacttgttgcctctgggcaagatggtggccctgggtaacagaaaagataagaaaggtaaaggagagagagcaaagcactgcctgtggcagggtggggaaagtgaagagctcagggaggccagaaaaagactcacctattgcagtgaaactaaaaagttcaggtggccacttgtcggtagtgaagggatgttttctggcagtcccatcagctctcaagtttccctttttcgggggaggaaaaagctccccatgtcctgtggtcctgtacatgccttatcctgtcacccatagcccttagcaacaagtgcaagacagattaatccaaagagaatagtagttaacattccatagtgccaaacccgttcttagctgagagggactttactgagaggagcctctaaccccctaaatcctaggaatgactctaaccttcctgagttgagccttgaacccaagtttgatcaagcatctttgcctttcattaataggagcctttagcccactctgccttaggagagactcttaactcccctaagttgggcctctaacccagtcccatcctttacccaggtagatgcaccccacttacccaaagtcagtcaactggtgcatgcagatgattttcctttgggttgggggtctcttcagtatcatccacctgggattcaccagaaagatgttactggaaacgggtcctgatccagaccccaggagagggttcttggatctcatgtaagaaggaattcagggcaagtttataaagtgaaaacaagtttattaggaaagtaaagggatcaagaatggctacactgtaggcagagcatccttgagggctgctggttgcccatttttatgttttttttttttttaattataggctaaacaaggggtggatgattcatgcctcccctttttagaccaatagggtaacttcttgacattgccgtgacatttctatactgtcatggcattggtgggagtatagcagtgaagacgaccagaggtcacactcatcgccactttggttttggtgggttttagccggcttctttactgcaacctgttgtatcagcaaggtctttatgacttgttgtatcttatgccgacctactatctcatcctgtgacttagaatgccttaactttctgggaatgcagcccaacaggtcttagcctcattttctccagcctctaaagatggaattgctctggttcaaatgcttctggcaatgacattcagatcagcaaggatacagagttgtctgttatgacccaatgtagactaggttaaaactcattgtagtactagtataatctaagacattgctgtccagaagaactttccacaatgatataaatgtccaaaagtgtagtcactaaccagaggtagctgtggaacccttgaaatgtgacttgtgcaactaaggaactgaatttttagttgcattaattttaattaagttgaaattaaatttaaatttacataaggctggtggctaccatattagaaacacagttctatgagattgcttccatgatgctatctcctgacaatggagaaagcttatcaagactccctccaggaccaaggtagtttccctgaggccaagagcttcttcaaatagcaaagctgtgaacaggttactcaagtaattcatctgatccctttgtataaccaggagaagctctgctgttcaccagagcagccaactcttttataagaggtgctagcagggcttttaattttctgttgattctgcacagtcactgtctagtaataaaggacggaccattctgaccaactcactgctgcccttttgtgcctaaccaaaaccacccctgtggataggcaaatgtcccagaaaacatcagccccgtggtggcctggagctaggcggaatttagctcagagtaaagatatgttacaaattaaatgttgcagttggtatgtaaagctgtaataaatagaaactgagttacatcaaggacggaattaaaccttaagtttaaactccacagcactgtaattaaaacttagcctgtagcaaatcattcacttgagattaaagtagtgtgggggaagcagaggtttgggcttaccttgctttctacaatttataagtctgagctaccaaaagctaacggccctgcccccaaatccagctcccaattaaaaacacagtttgaaaacctttaggaggcctgaggggcccctttaacagaagtctgccccttcccccctgcctcagtctatgaacaaattaaaaaatattacctggtcccctgatggtcctctgagctgacacggtgttttcattaatacatcattagagtaatgacattgtgctggcgttttgctttcaaaacagcctgcacttcaaccgccaatacaggcttgggggcttctgagcactttgttcctgggaaatattattcaggtcatataaagaaaaaaaaaaaggaagacaaactgtaattcatcattttttaatgcaattttattccaatctggatcattcaagactcgttcagtcttttatttttgttagttttgcaaagtaaacaccggggttatcttaaccgtggccttaaagcctagaaccagcaggcttttgcaattgcctgaaaacaattgctttccaaaaaaataagtttgtctaaggttggaagtgtgtcattctgtttaaaagcagtgtgatggcccgaagttgaagctgtttttttgtttttgttttttttttaattttctagactgtgaattgttacctcatagacaataatggatttattttggtgtctgaagactacacacaggtgagtgaaaattttctaccagctccaagtaaggatctcagaatgtgcttgggtcagggggaacaaattatggtgttaaaacttggagacaatgatctttatttaggaggtaatagcaggagattataaaaccttatttccatccctctaagaatgccacagtctgcttctcagcaggccccaaagagtttttacctcccactggggggtgcaggggggtgacagtgcccagggtctgttctctcactcataaaatgttcaatttatagaactcttagccaaagagttgtctgtgccacataaagaacttttgcctcgagggtggggtgccttaaatagtttgggcaactttaaggtttttttccttccgatatttcatcttcatatgtgtgcacacacatacacgtatgtttctacataattattgtttatggctttcgttctggtttttgctttttaaaaatcagttatctgagttcaaggattaacagcttgggctctcaacaccgagggacaagggtccagagatagaagaggaatattcttcatttgactgcaccatgtgcagtgtaggggtgggagggagagagatgaaaagaaaccaagctgtggacttgagcacagaaatctccactctgcctggaaatcaaaataagagttaaagtcgatggtactgtaatagaaaaacgagtttttccattcaaattttctgcattaaaacttttcctgcaattagaaattacattaacgtataaaaaaaggtaaaatacaaacaagttcaacagtgcatataataaagtaacgccatcacaggaggaaggtggtttctgatgttagctctcttccttaactagttttgggatcatcagcaagttccttaacttgtctagacctctagataggctctgtgcaatgaggatggttgacgatataaggtttcttctaattcaaatatttgagtatactaatacattataatgaagtctcttttaaatcatttaaaattctttagtagtcagcagtatgataggttcactgcttaatcaattagttaattgtccttaagtgtggcttcttagggtctgaaatgaatggtttggtaatttataaacaggggctccaggaaacttgaggaattgtgctttcatttcctgtcttattttatgagaatgttgtaggattttcagtgccccttggttgcgctattgagactcaaaatgcccattcccagtctcctctgatgctttacatcactagacatgggacagtccgtggacattagataggatgaatgggcccatgaaacaaggccagtccctgagacagcaggaaagtcctttggcctatagttatatgccctgttggctgggaggaggaacataggcattcaagaatctatggagcaagaatacacattagttgcctagagggaggagctctagtcttctgctctactcatgtaggggtgagagaggaatgatcccggggctcaggaagggtgcagtggatgtcttccgggggtgagtcctggagcagccaacaaatgatggaaacagtgtctctgtttcagccatgagcagccatggccactacagattctctgctctatgtctccatggaataagcctgcgatagacccagtgagtttgccagcctgctcagcctgggcttgtttgatgttgtctgacttcctgtgccccaattaggataattcttcatctaacaaccagtttcattgaaactggcacattacacacacgaaatacaaatgtccttcttgctcctagcagtagtacacgcccacagagtttgcaaaagtttccaagtttccctgtagtgaaaaaggaagtggtcaatattcagtcagagaaatgttgtttccttcttcctccttttctccccctttacattttgccaaagtttatatatgtgtcttgctacctgaaaactcccaggagtgtggttgaggtcactcagttagttgcaatggaattggggtttagttaatacaaagcctacggaatatacataatttggattcttattgcagtgccctccacccacccacccacccactcacaagctacaaatcttcagagcacccagagtagagatggggcttctcttctggtcaacactggctcatttcagcatgttggcagaaggcccttactgcaggctctgttccatgcactgcgtacgccctcccccatgggacaccttgcatgatagtagctccagaaattcagagggcatgcatgaggatgttaattcttcattccaccaaagtttgcaaatcttggccagcaccaagaagtagacttacaaaaacatcagcctggtggtggggaatgactgcaaagcttcgaatgaccttaagacagcctcaggtgtggggtaggccattagaagtctcattggccatgctgtctcctcaaggggctggatagtcttactcttggtcaacatgtcaactgcctatgacaaaatgaaagtgatcctcagaaagtgattctgagaaagggtggattctcaactgcaggaactttattgggctgatgaagtggactgctgtatttccctaaacaggtcgtccaggaattataaacaattctttttattagtgcttaggaagccctctcatagtctgtttctgcctatatgaagtagtgttttaatcacacgggattatgtgcatattactacctactccatccaagggtagtggggtatgtgtgtgtgcacatgtgtgtgcatgcgtgttttaatttcagcattcagcatgggttacgcagccccctcccacgtactgtggaagcattcacatctgctctctagtttgctgtgtaatcccatgagttctcatgactgttaaaaccttttccactttcctgaaaacctgccttttgctcctgtcagttccaggacacagactgtgtcccttttcatttcttctctcctgtttgggcacattatttatctacacctcctcatatgtcttcttccccatagactggagacttttttggtgagatcgagggagctgtgatgaacaaattgctaacaatgggctcctttaaaaggtaagggttttatggtccactgcattccccccaaaagttttcctaaataaaataaaacaagccaaggtcaaataaagcaagcccagacttgaccctgtggctggtttttacttgtgttcatgctccaaaagatctctctgaaattcgatgcctcttgcacgagtgttagagtgttagagtcttagaaactcagttcacaatgagtttcctgttcacccagcagagcatttattggaggccagtattgaagtaggaggctgcactgtgatgtgattatgtcagtctgaagcaagtcactgcgaagaagtaggaaaggttttcacctggccggaagggtggagtgtattttgtctcctattgattaacctgggaagctccctagaaatctggaacttggggatgaaaggtggtatttagagacttcttgatgttgttttagaaaatcaagtgaaaattctcaaaatccgctcttgatggaggtaagtttaagtctgcttctggaagaaaacctagatggtgccaaattccacaggtggcagatactgactactcatccaggtgtaagaactctcgctgatcctgaataaagcttgtgtagagcagcttccttatggccccatgtccctcatgggcaggccagccatgctcttgggaatacctaaacttctgggaaaagccatcatcccatgagatcgggtgttagaatgcctccctgggggtccatgctgtctcccttcccttggcctcccaggaagaatgttagcctttcaagtggtgctttaatgggcatatttgatgctgttaaatatataatggcaggaaatgcaaggatggccctccagcttccctgagagatccattgcacatcggtggccagtgggtaggcaggcccctggtttattactcttctgcggctgaatggctaggaagtgttagctcaggaaatcagacttttaagctagtcaacaagaccaactgagcactttgctgaaagcagggaattcaaaaatgatgacccagtgtttgaaattccatagcttgtttgtgccagaagggaagaaaaaaaaaagaaatgatataagaacctggcctagtgccagcacttctgcaatctctgacatacttgcttgctctcaggcctgcctgtagcagatcgtcccctcctgctcccttcccttctaaaaaaaattcaagtacagttttcttctttgctgggagtcattgtacacatgcttgaaaactctgcttggatctgggctggagtggctgtggagttttccaccacttcttcaagcttcctgcagcagctcctggcctgccatccacggcaccactgacttttcctatctttatgtggatgtgtgcatttgtatcatgttaacttcttttcaacttggtggggggaggagacaaaagatgaggaataatcgcacacgtgtttctcatttgaaagcacatttttcaacttctttaacaaacctattttttcctctccctcttggatattcctttcaaactgtttggtgggagaaagagaaagggtgtaatggaattttgaacctctagtcttctccttcatgtgggtgaagtacagttggcatgaatctagaacttccttttactacaagagtagccaacatatttgagaaaaaggaagggctgggaactcagttattacagcaactgctgtcatccaggagcaagttgacaaacctcctgggcttctttgacgggcctcctcactggggccagtagagcattgagagtttgatttttggagtcagacagactggggtcaaatctaggctctgacattaccagctgcttgatttagtcagattacctctccaaacactggtttctctacatggaaaatgaagatgacaataattacttccaagggttgctgtcagagctagtgagatcatagtaagcataaagttcttagcacagaacttggcatgtatgaagagctcaattagttgtgagctgcagccatgatttttgttgtcgatctttgttctgtcttgaatttgctttccacttagcaccaggtattgcttcatctacatttacacgtctccctacaggcttcctatgacaccatatgatgggtctctggtgttggaggaccacagtccttgcaatcacacatttgtgcccttgcctttcccagcatgcagtgcttgctcagagcataaggttgacactcctgtcattcagagaagatctatagttcagaagcagtgaaaggatatagttggctgtaactgacagcactctggatcagaagtcatgcaccatattgaattgagcccaccctcaaacatgggttacatgaagctgcgttgctctggtgctgtggttagcccaggtgaaactcgagatcagtttactgtgctgacccctcatctcagcatcttggacagcaccgggctggccctcagtttctttatctgatagtcttatacccagtcctaaagaaacaaatttcagaccgggtgcagtggctcacgcctgtaatcccagcactttgggaggcagagatgggtgggtcacttgaggtcaggagttcaagaccagcctggccaacaaggtgaaacgctgtctctactaaagatacaaaaattagctgggcatggtggtgtgtgcccataatcctagctaattgggaggctgaggcaggagaattgcttgaacctgggaggcggagattgcgataagccgaggtcatgctacggcacttcagcctgggtgacagagcgagactccatctcaaacaaaaaaaagaaagaaagaaagaaacaagtttcatgcacaagaactccacaaaccatcttctccagaaagacagagctccaagaggagagcactacctcccttcatagcctcccctttgtttctctgtcttggtcattttgctgcctctctccagggaagcaaggtgatgcttgtctgggtgacagcagacctctcccctgaccattctgaccactcacctcgtgacccattggctgttctacctgacagtgccatcagagggaaagaacatccacttctgggtctgtagtgcaggcagaaggaaaaccactgatttatgtgaacaaattaacaacttgaaagaattttgagaaagtctcacagcagcgtgtgaaacaatctaagaggcaaaattgaccactcttgggcactttagttgactctttgacctgactctagccagcttacatatgacctagtatccaggatccaactcacagaccaataggttcagcagcatgacagtaataatcatggctgcgttcgctgagcacccaccagactccaggcttggcttgtccttgacagatcttacctctttgcaggctttccagtaactctgagacaggcataaataggaccagttgcacaatttgcagggcccagtgcaaaataaaaatgtggggccctgtgttcaaaaagtgtcgagtatttttttttttttttttgagacagagtctcgcttgttgcccaggctggagtgcagtggtacaatctcagctcactgcaaccaccgccttctgggttcaagcgattcttctgcctcatcctcccgagtagctgggactacaggtgcacaccaccatgcccagctaatttttgtatttttagtagagacggggtttcaccatgttggctaggctggtcttggactcctgacctcaggtgatccccccaacttggcctcccaaagtgctaggattacaggtgtgagtcatcatgcccggcctcttgcaactatgaagagaaaatctagtctcaaaatcctttcattagaatttgtttacccctggtaatgcaaattcaatgttgtcatgtatctagggaaaagggagaaaatacagcctgtcataggagtcttcttctttcaaggttcctgacggggcctttgtgatactctggacttgaaataagaagacttcaggttgagcacaagattctccactgtgtggccatggacggtgtcgtcagcctctctgagcctgtttcttcattaccaaaatagggatctcaatggattttctgagaattaactaaaatacaatatgttaaaatgcttttcaaattgcaaagccattgcaaacaggagataagaataccttttgagtagagttccatatgtctgagttcttcttattttccaattttctcctgttttgttttgtttgtttgtcttattttatcactaataacccccaaaggatagttactacatagcagttacctttacagcacagtgttggggtgattcatggacctgaactctcttgtgcgttagcatccctggggacctttaaaaacactccaagttcaagctgcagcccaagaaatcgtatattaagttgatttggggatgttgcccaggcacttgtgctctttaaaagcttctctgtgattctcatgtgcagccagcatcaagacacgaggttaaaagcatggtagcagtctagctactacgctcttaggagtcacctgatctttgcagcaaaataggatgaaaataattattcatatacctacaagtgagggatatatggaatgatatgtgagtaactgaggtgtccccagcttaaaggtacatacatgcctacagcccaccctcctgagtgtgggcactcagcttccttcctggatgtctcccattgtgaccacaggggagatccctgcaggacacaatcagctggcacaaatgaatcatatcacaaagtgagagctcctggcggtcctctctgatccacaacttctacctttctctgtttcctctgttctttctcctctttttagacttctaagcaatgtctgaatccgtctcttcctagagggaagagcccccagcccatctttttgaggtcagcttcttggattatcttcttgtccctgcatcctccccttagggtgtgatgggaggggcccccaccttcagtgtcttgatggtgcttgtgttagtcggttctcacactgctataaagaaatacctgaacaacaagaaaaaaaaaaaaaagaaaaaagcagtacctgagactgggtaatttacaaagaaaagaggtttaattgactcacagttccacaggctgtacaggaagcatggctggggaggcctcaggagacttacaaccatcacggatggtgaaggagaagcaggcatgtcttcacatggctgaagcaggaggaagagggaggaggagatgtgctaaacaccttaaaacaacgagatctcgtgagcactcactcactatcacaagagcagtaccaaggggggaaatctgcccccatgatgcaatcacttccatctgcccccatgatccaatctcggccccacctccagcattggggattatagttcaacatgaaatttgggtgaggacacagatccaaaccatattagcactttactctcctagaggcccctggggggcactggaactactgatgctagggcaaaacactaagcacatagacagcaaggataacactctgggttaatctcaggtagggcaccttgctccagcaaaatatctagcagattgctagtaagacatgaaaaagcaaaggctcttccacccttttccaattcctctcctcccttccccttgtaagtaatgtaatacatcttgcctgagttctgcggagctgggcaccaacctggacatgaagtgccatttgttacatgagaagcacaaatatgacttttaggacatttgagccagggagaccgaagggaaagttgaaatgagttcaatatggagcccaaggaaagagcaagagccttcaaaaaacaggtaaagaaagaaatctttactgaaggatgaaaatgtggctgttatcaaatatccagaacttgagggtttgccctgggttttttgcttttaccaacatacttgtgatttctggaaagaccaaaggctcttcccttgttctttgtctatctgattatgctggaggccagaaagaccaatggagcacacctggcccttggcttgccaggaaatggactgctctcgtcgagccaccagtagtacctatctttcatggccattgtcttatctgtctctctctctctctttttttttttttttttggttgcaactgctagtgtgtgtgtgtgtgtgtgtgtgtgtgtgtgtgtgttttgtgtgtgtgtgtggttttgcgtggtttttgttgtttgtatttctgctgtgcttggtgcaacacgcttgagcttttacctgtccaaggccattcatattttccctatgggatctggcaaatgtccttgtcgctgcaccccacaagtgttcattaacatggctggcttgtgtggaattccctgtggcagcttctgctatttaaatcacctttctaaaaggtgacacatccaggtagaatccaagatctgtatcatttctactcctgtctctgtgtggtgggacttgggagctttccctgtctttggtaatcacattacacttcagcgagtgccctggccttggagtgtagagagtgttaaaggagaattctgttatgtttggatggctgctcgcctttaatgccgactgccccgctgatgtctaatactcaacaactcatgtaatgagtgtaatggcttcgtggcttcctgctgacctgaccatgtcctcagaattatgctttgtcagaggtggcattgaagggaacaaggagacagattggtttggacaagtatatttctgggccaaactttctggaaggcagagacatggagcttccaatgaaccactctttaaaatccaaaagctgctgcttgagcatccccagttacagcaataacagtaactgccctcatcttcatcatcatgcagtctgtctcacttattaaatactaactataggcaaggcattattccaggcagttaacatgcattaccttaattaattcccatcacaattccatgaagtaactactattattatttccatttgacaaacaagggactagaagtggaggctcccagcaacttgtcaagctctctcacaggcatgagtgagaagacagaatttgaactcatgtctctcagattccagagcatgttctcctgataaccattcatgtcttctccatagttggagcagactagcatatcttctgcagagtttttctttttacattcatatttgctctgccttaagagatagagaaagaaagtctttctttttatttatttatttattttttcttgagatggagtttcgctcttgtcacccaggctggagtgcaatggtgcaatcttggcttactgcaacctctgcctcccggattcaagcgattttcctgcctctacctcctgagtagctgggattacaggcgcccgccaccatgcccagttaatttctgtatttttagtagagacagggtttcgccatgttggtcaggctggtcttgaactcctgacctcaggtgatccaactgcctcagcctcccaaagtgctgggattacaggtgtgagccactgcacctggccaaagaaagttttttaatcaaacttagagtccaatgtattagttagaattggtccagccacaaataacaggaaaatccaaattaacagggacgacttaaagaacataagaggtcttttttcatctcttatggtaaggaagtctaaaaatactaatttgggaccctcacgttacagacccaggaccacaactttttcttctacctttctccaagatggcttttaagttcaaggttacctcatgattcaatgtagctgctgagccccagccatcatatctgcaattcaggcttgcaaaagaagagttcagggagttccaaaagctccaaaaggccaagtttcaaattactttttaataaatgctttaaataagatttttaatgtattaagcagcctcccatacaatacttgtgcttaatcacttggccttacctcactacaaaggaacctgggaaatgtgcatattaaaaagtcagagttctgctcaccagaagaggagaatagttattgtgaaactactgatagtttctaccacatccagcatgccccagtttgcttcaaactatatgagtcctctggcttcctctgataacccctttggaactccttgagtgatggggctgtattcataactcttctcctagtcttccctccccacagcatgcccaatgcggtcctgaacacagattgtcatagccaccttctaaccacctgtccgtgtgcctgcctgaccccagacaatggaagtaggaacattcaataacacctgttgggttttatgaataataatcataacagcagcaataccaacactcagaggtactaacatttattaagcctcaatgacatgccccacactgccaagtgcagtacaggcatcattgtggtgcagttgctatgaaatatggacctggcttcacgaatgtggcagagcccaaggacgcttccccagaatcagctctcctgcttcaaatgggttttgcattaactcattcccaaagcagaattcagctttttccttctaaggagacaaaagaaatttaatattttctatattgaattaattgtgattccattttccccttcagtttcataagtgaagctaatttccatgggaggggctgcgtgaatgggcaaaccagctggcagctaggtgcatttactgggcacccatgaatttgatcacttgccccaggagcaaagcaaatgcggttggtagagcaacatccgctctgagtggggacagggactgtcttgatgcttgaagtttgttggtctccccagggccaccttctttcagaggaccctctcttcttggctctggggcactcacacttgtttatcaaatcagtgctgctctccaggacaatgggaaactgtttatccttgaggtttgcaggtggcacctcctatttggtgagtcaaggaagtacccctgaatgtgtccagactggtactaagccctgggaggatgcgtctgggttttaaagtggaaccaacccaaatgcccatcaatgatagactagataaagaaaatgtggcacatatacaccatggaatactatgcagccatataaaaggatcagttcgtgtcctttgcagggacatggatgaagctggaaaccatcattctcagcaaactaacacaagaacagaaaaccaaacaccacgtgttctcactcataattgggagttgaacaatgagaacacatggacacagggaggggaacatcacacaccggggcctgtcagggggtggaggactaggggagggatagcattaggagaaatacctaatgtagatgatgggttgatgggtgtagcaaaccaccatggcacatgtatacctaggtaacaaacctgcacattctgcacatgtatcccagaacttaaagtataacaaaacaaaaaataaaataaataaagtccagttcctgcctgcaagctacttacagttaaggtgagaggggaagaaacaacacaagaaaatgcaagtgaggtatatcacattctaaaattcatggctgtcaaacctgtttgcacattagaattccttagggagcttaaaaaatagccccaccccagactaatgaaatattgcagataggaggtgagatgctaggtatcatcatgtatataaaattactttggcccggctcagtgactgatgcctgtaatcccagcactttgggaggcctaggtgggggaagtgcttgagctcaggagttcgagaccagcttgggcaaccacatccagcacgtgaaacctcatctctacccacccccacccaaaaaaaaagaaaaaaattaactagatatggtgacatgcacctgtagtcctagctatccaggaggctgaggcaggaggatcgcttgaactgaggagttgaaggctacagtgagctatgtgccactgcactgaagcctgggtgacagaacaataccccatctcaaaagagaaaagaaaaggaaagaaaatttatttgaagttccccaggtgattccaaagggcagccaacgttgagaatcactgttttaaacaaatgccaatgtgtatgccttaggaattgagagtgagtttacatccaattttccagattcttcgatgaggcctcatcagaggcccatgagatccctaaggagcaagatatcccttgggaattcatgtttgggaagcagtttaagtgtgcagctttaaactatgagacctggactaataatccagcccctttgattactagcgtgctgataatcttggacctgtgacttcatctgtctgagacttagtttccccttatataaaatatgaccatcagagataatgtcaacactgctgacagaaagtaatcaattaattctttttttttttttttttttgagatggagtcttgctctattgcccatgcccaggctggagtgcggtggcacaaatctcagttcactgccacctccgcctcctgggttcaagcaattctcatgtcttagcctgccgagtagctgggactacaggtgcgtgccaccacgccaggctaatttgtatttttaatagagatggggttttgccatgttggccaggctagtcttgaactcctgacctcaagtgatcggcccaccttggcttctcaaagttgtgggattacaggcgtgagccaccacacctggcctttaatcaattaattcttatggttactgttcttcttacctgggtaagatgctgatgggattaatatctcagtatctacaattttgtttctctttatattatcagcacctgttgatgaaaggtgttgatttggtgccaacagaccctctgcttaatccaccaaatgagtgacgctttcttgttgctccccattcagtgttcagcagtgaaccctgggaggtcctgatagcctgtgtggtttattcttggctaatgatgggtgctcattagctaaagttggtttttgttttgttttgttttgttttgttttgttttgttttgttttgttttttgagatggagtcttgctctgtcgcccaggctggagtgcagtggcgtggtctcagctcactgaaagctccgtctccagggttcacgccattctcctgcctaagcctcccgagtagctgggactacaggcacctgctaccatgcccggctaattttttatatttttagtagagacggggtttcactattttagccaggatggtctcgatctcctgacctcatgatccgcccgccttggcctcccaaagtgctgggattacaggcgtgagccaccgcgcccggccagctaaagttgtttaactaatttccagttggagggctcaaaggcagtaggaccagggttttgtaaattcactgcctctgctgtgttagagacactgcaccaatcttaaagaacagtgccatctctgcaagaagttgctgtgggatgagatgatgactgatacgagcaggagagaagggagagcacattttgaatcttctattagcactcctatcaacaggttgagccttctactttcctggctttctgagatgtaagaatgagtaagggcttcccatggcgacggtctctttgttaagaatttcctatgttcctcccccatgccttttcaattgcaagttgaaagctgcccccagaggacacattttatagcgcaacaaagaagacatatttttacatgctaccttagtgagtcattttgcttctcagacttttcaattcggaattgcttaattatgtcccatgataggtctctatgtctaatgcctcccttgtcctgtttttagggctgtatttgcagacattaagctgtttcaagattgtttttaggccagttgtttagccaaagtgagctaatttgatgaatcattacaggaaaattacctggcctcacggtacatagtaggtgtttaataaatgttgagccccacagttgctaaccacccctaaattagccagcctaaattagctgagcttatgctgttaaaatgcagcctgctaattcttagagcaaatatttttcttggtcaggatttttgtctagttggaaaagaaagaacagtatcagcaaaatggctttaaacatgtcttaatgtcatgagtttgtcatccaaggctctacccagcatgggtgcagggctaccaggctttgtttgtattgctttgagttgtttcttcagaggccgtatctgccttctgtcaaagtttaaagtttcaaagttccaccatccatgtgggcacacagcgatgctaatgataaggttggttggagtagcctggtggtgatgtcatggggattaaggcatgttatctgtaataagaatacacccccactgctgagtgcagctgcacacagcaccagtcttgggctgggcatgattctcagagctgattttagagtcaaatgaaagcaggcaattatcatgttctttaactgtaatcagccgaacaggatacaggtagccgcaaaatggagttatttaaaacagtaacaaagtcacttcaaaaagggtaataatctggaagtctcctgctgcaatatctagttaaagctgtccaagtgtggagaagacagggaaggcttattttgtaacctcgtcaatggcaatagtatcaggaaagcctccttttgaaatagaggagtggggaacaaggggagggagagtgttaggacaaatatctaattcacatggggcttaaaacctagatgatgggttgataggtacaggaaaccaccatggcacatgtattcctatggaacaaacctgcttgttctgcgcatgtatactataacttaaagtaatatttaaaaataaataaataaataaaaggaaccttggcctgggggctgccccagagcaatttagtttagccccaacatgtaaactagagcctttgaaaatgatccaaggagaatcctgagtttcctgccatctgtcagagtggttaccatggtaagaagtattcacaagtgcagccagctgttccagtctggcctggtgactcatcagcccttcagcttgggttgaaagttgattctggacattggttatcttgggcagcattttttgtgacattccaataagaccctgggctggggaacaggtctgaagcctaagcatttcttagaatctgtcagagcctgcttctgagcagagagcaaaaggtggtggattcagcttggccccctactaaatctggctctatcaccaatgatctatgtgaacttgggcatatttatttaggctggctaagacttggttttcccctctgtaaaatggagatgattataatctatcttatagggatgtgtttagaggagtacctcgcttatggttgctaaacagagttcagtacacatcagctgttgttatcattgccttccgctaagaagcccatggacagaagttcctgcatcatcgcttggtaacaccagcacagcttctgatggtgtccttgtattgcagtagcaagcatggattttcctctgcattgtctatgccaatgagctaagaaaaccgggagccttgttcatctttcagccagctgggtaatgcctgtgtcaattcccattcctttaaacaccagcccattaattggtagtggcaatgaaaagataccaatacttataacagcagctatagctctgcctcctgttggaatacttcctctctagcaggcactgtgctgaatgcaacacatagataaccttctttaaccctatgaccaccctataaggtagtcattattctcaccatttcacagataggaaactgaggcaccaagagggttaaaaagacattgttgtaagtggatgagttaggatttgagctcaggtattactgacttcaaagatggcattttcactatgtcacattgccttctcttgagcctttgggaacagtgcagctttaagagcccgaactctaacaaagaataaaatcagtcttctgttgtaaggatcttaacaacgttggcacacttagagcatatttcagtgtacttctacacagctggttatttagatctcagaacatctctgtaattgtttaataagtcaggaaacgaagcctttgaagagtaccagcaagctgctcaagaatgcaccctggaggccgagcgcggtggctcacgcccataatcccagcattttgggaggctgaggcaggtggatcacaaggtcaggagttcgagaccagcctggccaacatagtgaaaccccatctctactaaaaatacaaaattagttgggtgtagtggcatgtgcctgtagtcccaactactcgggaggctgaagtgggagaatcgcttgaacctgggaggcagaggttgcagtgagccaagaccatgccattgcactccagcttgggtgacagagagtgagactccatatcaaaaaaaaaaaaaaaaagaatgtaccctgtatatacgacaggaccaacttttgaaaccatggccatcctgcatccatggctatgagactccaagcacatgcacattcctctcaaccccatgctgcctctcacctggctctggcacatgttttaggtgtagagacagcattgggcagtgggaaaaggataagtcaataccaattcttgccaaatgctagaaagcccttgcaggggtacctgtagaaatctcctgagtgaggatggagatggtggcctggcgggccagtcagggaccaattagagttgtccattgtggtctgcagttgattctgtgacatatcccggtgtctgggttagtgctagggctgtgtcaatggtgagagcgtttctgtgagaagtttgtgcggggacatccccaagcctaatgcttggctgatttatggtcttcgtttctgtttgtgtaaacaaagcttcaaagcttcttgcctgcatctgtgtaaggaaaaaagccagaggacagtgaagaaatattctgatgaagaaaagaccttgaggactggctacgtgaccactggtatccccttgggctttgctgcccaaggagtgctgtgtgatgctgctggttaggagctggctttgatcttccatttggtcaaatgtggctggttttctgcttggtacccacagacgactgtgtttaatccatttatcggtaatgtccgtaagttactgtccagataaggagcctccacatcacattttgcagttgaccactttgttctcatcatctgtgtaacatttgtgcaatcaggcaatcatttatgcattcacccttttaaaactgaatgccttctgtatgctgggtgctgtactaggtgctagaggtcggtgtgaaacagagccaacaccagtcctgctgcatgaagcttttacatctacaggtctttccgagcacagcagtaagtgcactcaacattaaccattgtagtattctagaaaggaattcctgtggagagaatttcatccagtcatgtagaagcacatgtattaaagtgtttaaaatctcatctggcagttgttatgtaactcaggctcgactttacatgtctctcctttgggctgctactcatggcaggaggggatgccgaagggaagggtgggaatgccagactcctttggctatacctttcaagcatgggataagatgttcataccatctaaatactggaacatgtgtaggggcaaagagggagagcttgccccatcatcccctgaaggtttgctgaaaatgaactgacaaagggcaggtgaataggaaaaaaaggcacacaaaatttattttaatatggacaacacaggggaatcatagtagaatggttacccagtaacccaatggggtacagatgcttaaatgcccgtcttcgtaggggagggaaaagggggaaatatggctacttgagggataataaatgattttgagggggaaacgagtgggcctaaatggttagtaaataatttcaatggaaattgaatgggatggagagctgacaatgatttgggaagaagttggcctgggctctaggtgtggtgtttaattttcaatctcttcctctgtaatatgaattgtaatcttctcttctctggtgaatgaaatgtcaggaaaggcaattgtattcctctttggcagatctggcttttagatagataagggaacttcagaaaacaactgcatcctgtggtttgggactgtgtggtaagggagacagggagcaaggtcggagaaactttgagactgcttcaagtcaaagcaccatattttggcgtaatggtttctgagtccgaacacatgctaccagaaattgccattcacctttcctttgttgatgggggaattaaaatacattgaataatgttaaagtaaaacatttttgcaacagagtaaaggtcataattgggatgaaagccatacttttatcgccagtgtaggaaaaaaatgtccaccttgtttttgtttcataagctatgctgttttcaaaataaggtacattcactcttatggtgatgacaataaggagtagggattacaattagtaagccagctggtttcctacactttgtcaatgtacagggcttatcctggtccaaacctgtttcctggtgcttaagaaacacagaatcctgccatgctttatcccaaagtggttcttcttagttctcctgtcccttggagacatggcccaagtaaattccatccgggtcttagaatccagttcagaacagcacattccctttggaatatcttgctcaatgcagaccatccttgttcagaccaaatgactgtttcgtcaagttagatgggtcctcatccccctctaccctttccaataccttcgttccctttgtccttcaaattccaagtggtaacatgactgtgcctccagcactggcctttgccaggctccttgttcatcatccatgttagggctgcatggtgtttgtcaccgttgcacttgatgatagtgactgctcaccttgtagtacatagcatcaattggttcccgtgttttctcatttagtgaagctcccttccatttctttcctgtagaattaccctttatgactaccaagccatgtgtagagccaacaaggaaagcagcgatggcgcccatggcctcctggatgtaagtactatgctgtcactcagaaaacagccacacatttctgtctttctccctgtctgagtgttatcttcctctttggagtaatcaagtttatctttttgcaaaatcatgaacattttgactttactcacttaaaaaaaaaaaaaaacacttcaggccgggcgcggcagctcatgcccgtaatcccagcactttgggaggccgaggtggctggatcacttggggtcaggagtttgagaccagcctggccaacatggtgaaaccctgtctctactaaaaatacaaaaattagccaggcgtggtggcgtgtgcctataatcccagctactcgggaggctgaggcgggagaaccgcttgaaccttggaggaggaggttgcagtgagccaagatcatgccactgcactccagcctgggcaacagagcgagcctgcctctcaaaaaaattaaattaaattaaattaaattaaaattaaaaaaagccactgctatatcaactgaaatccagtaattatatgaatgagaaatggatctaaagtctttgatggattaatgcagcagccccttgtgacagatggaaaaagggagaagttttgttaattctctcatttgtatataaaagaacttggttttgttcaacagaacttttccttttagtttgtaacagagttgtgagcttttgccctaattcccattttgatcacaggtattccctctcccctaatcatgccactgggtttcagcatcgttttccctggagctgattccttggtgatgtcacagacgaggatcaatcagcatagctattgtaccattagaaactggctttcagatggccagaaattaactgttaccacttactcccaaattaaaaatataatttacaatgcgtagacaatgtaaatttggccagcaatacctaaaaacacagaaaaaaaaccagacatagtgtacctctggatagtctgtcacatgtgtttaaatataacccttacaatgttattattttgtaaataccaaaaattaacctaaaattttgtttgaaacacaacacttaaaagccattttggctttaaaatgtgcatactttctaatttgcagatgtaagatgttacaaggggattatttaaaaaacagataattaacacggttctcctacactgagggagcaagaaatgattcagagctggcaaatttgtaagaggcaactaaaatgaatattttgaaaaatacagctttttagtgagactcactatgtctttctaacccaactcccctaaccttagcatgaatatttccagacattaaaggttcccaagatatattttcaccattagatttaaaagctcagtggctttacgcttttagatgataatgtgcatttaaatttttttaatcctgtatttgcataatccctttgtttactcatatattgagccaatgcctggcatggaatgcctgagtgccttcccctggcctcagagcgagctgcccctgcttctggccctctttcccccgcaacctccaaagcttccttaatccttttattcactctctccttcccctgacccacattacccacccagcagatacaaagacacaacatcgtcccatagtctgaccagcccggtctttttgaaagcaagatgattatttttcaagccgtaaaatgtaatggcaaaaccgcaggactgcaaagtgtggtttcaggaaactgttaaaagttcacatccttatctgaccctaatcctggcggcccagaacactgtgattcaaggaatgatgtggaagcactcggttgaaccagagcaagagatacaccaagtctgaaatctgggtgggctgggaagagcctcagcattgttgttgttgttgttgttgttctgctcatttactttctggccggactgggaaagttttgagaatgattgggggcatgtaaatttgttcttgtttcatttaaaactggataattcctccattctcagttctagttcttataattaaaatgctcagaaggtgggattaagcagctctagctgcagaagcaaggatttggcatgcatttcaattctccgatatctaaaggcaaccacaaaaggttctgagattcttctggacctgacatctggagcccagagcccgggatttgccagcgtcattgtctgtctctcaagttcacccaccactcacataactggcatagctaggtacaaagaaccaactgagggggagacttggtattttccagaattcaggaaattgaattatccacataggaaatatcacagagtaaacaatccaactgctttttttaattaaaatattctgaaataaagattaggctttcaatgccttcttttatagagtgaaggagattttcagcaaggataaaatcacatgtttatatggttatcattttcttcaagtccaaatatgtaagtgtgagaaaagacagcttaaatcctacataattcgtggacggcattaaaatcaggtgtatgcaatttttgcttattttagtgaatgacatacagtgatggagaacagggaatcacctttccaagaggctgccctgtaaattaccatttgaaattagttatatgattccagccccctcagcattaagcttcaaaatattagcccctagagggtaaaggtttaagcatcgggtgctgaacttcctttttcctcccactgataacccttgtattagatcaggtttattttacttgtaaatcacatctcactagagtggagttcaaagttttaaaatgtttgttttaggatacagtatccaacaattttcttcacttagctagaacgccactgttttttaacatgatatcaatctctctagaagaataacattgtccttatgtaaagccctaaattaagctacaaattttgtgtgcactacattgtttttaatgaactgaattcttctcttcagccttataatgccttcctctctgcagtaaaatggatcatgacagaacttgtcttgtaagtaaaatctgctgcatttttttgaaaagtattaatattttcctttttgtatcataaagtgatctaagagattgtgagtcatgccttcaataaccattagattcctagtactctgagataacttcattgaacatctcaaaatattgaacacagagaccaaaaaatgatcttctattaagtgactgttgatcactccttatgctattaggtcatcgtttagcagatcatttgcaatacacaacaaatttacttattgtggttactgctcaatttcacatggatgtctggctgattttactgcagcctgggtgggctgtggtcagaagagcacactgctgtgactgtccaccatgccactttggctgtcttggcctgtgcaggaatgggtgcctgtgagattgtcagctagggctgggggctttctcaggtatgatttcattgtttattctgtcaaactatggtcttgtttggaggtgctggttgcatctatgacttagataacacttgaaatggcacaaagatgaaagtcttgactttcagactagatattagacacattacagaaacaccgtgtcacacaaaagggaagaattacatagatgaacatgtaaacaagattgtttaagttgtaccaaactctctcattcttatttcccctgcttatttcctacagactccagttctgtgggtttgaggcaaatttcatgccatttgatggatagtcactgtcctcttaacttaatgtaacctatattaatttaataaagtttgtgaattcaaatgggaagtaaattctccatatacacatgaggcagagaaagaacattaacagataatagtgggattttgattgagagagagctgctaggaatagtagccataagcctgaaaaacaaatgaccaaattttgatctctcttcatccactggaggataatttatattatttttgtagtctttaccagccattgagaaatgttgatttttatgaagttccattgtgacataatttcatagagagaagtctgttccacctccctctatacacacacacacacacacacacacacacacacacacagggggcttaaacaagttcaagtcgcagtattcattttgaaagcatgttttattactacagttcatagtcttggtagaggagaatattctatttgtatttctgaactaagggaagagaagcttattagaaattggctttttactgtggaatcaaactagatgatattaagattgaacaactggtgaacaacaacgagaaaagtatttcagcctatacagcaggttattcctcatctaggaatctttgagtctaggtgaacctggctttagggataaaatagcctttcacaagaaagataaacccctgtgaaaatttagtagtaactcagccaactgtgttgatatctccaaattgtgatgttctcaaatgaggtaagcgatgccaaagaatacagaaagtcactgttctgtgatatgggcatggatgacgaagtaacattgggcttttccacgatctgtttaggttcctggtggaatttaacctctgcagttggtggcactccgatatgacagctaaaggtgagcagcaactggtttctgtttcccagcttggagggataagcgctgggttcactggctacttttcatcagggatgtgctggctcacagaaaattccccaggacaaagtgatgatttttcagctctgtcagcaaaaagccagcctttgtgctaagtgctgtgctatctagtctgacacagaattccacaggcttcattcagcccacgttgaatgtacatcttgacctgtttccttaactaaggctttgaggtcatacattgcacaggtaaattcttcagaaagctcatgggcaatgctgaaatagaagggagacagacacactgcctgtgtctcaggctaaatgaatgattagccattctatttctgttttcacagttaccctcatagaacataaatctgaccacattactatcccttctcaaatacctttgatgatttgaggagggtgtaattagtagagactcttggaggcatgggttgtggagttagaataggtttcagtcccagcttagaggttggccttgggcatatcagctgatctgtctccaaggctcagtttccctatgctaagcacaatggggaaaaataatatttatcttagcaagtgaatgtgtgtgtgtgcatgtatgtttaatgctgtgagaaatcatattacgtgctgaccacagtgactggaacataagtcctcaaaaaatagtagcaatactgcatgttctcatgtataagtaaggtaaacactgagtacacatggacacaaagaagggaacagcagacactggggcctacttgaggtggagggtgggaggagggtgaggatgaaaaaactacctatcgggtactacgttcactaccaggatgatgaaataatctgtacaccaaaccctcgagacatgcagttgacccgtataaaaaacctgcatgtaccctccacacctaaaataaaagttggaaggaaaataaataaataaaagaaagagtatccgtaattataatggtggtgacactgtgaccatgacaatgatgatgatcgcctccaaatccagtgatccttaatgaacgctggctccagcagtctgccccaggcctgcccactcatgtgctatttctcagatacactctgttctttctttccttcattcatgttcattttcctacttgggaggccagggactagtaggctattaccattcttattatttctaactgtctgtcttttaaaaaagagattgattagtcacatatcagcattgccccaggtgctggatctattttaatctaacattccctttcctttcccttaagatcccagtctgtgaggattccctcaactccctcaggcagaatgaacattttcttcttgctcctgccccagtcagctcatgcgttatcctatctcttctttaccattattgcctcactgtttgtgttttacactaacctagaatttcttgatggtaggagctgtgtcttaaacattgttctctcttaacacctaactggtgctgagcacacagtaggtgctttatctttgctgattcaatatcctaacaaatctttctggtgctaggcatgaccattagggtcactatagtcatggctttgtaacttacacataggctcgttttgccggaatccaggaactctctgatttctgcttagaacatgagatggagcagaatctgctgagttctgcccctgctgatgcccgcatagtttgctctctgataactgggagcctaatccatgcctgtccaggcttggctctgccctgggaggctgacagcccagtggagcagggcccctgtgtgctgctttcatccacacacatgcacattggtctggtgacccccaggactgggacccaattttgctcctccctgctgggttgagttctgagtgacagtgagtgccccaaatcccacttatagaaattcagcctgaggacataaacctggatgggaacaaaggtttctatgataggatgatcatcaccagggaatttataatcgcaaatactggtaactctttaaatgtctaacactaaagaccattttacaataaattacaacccatccacagaaagaaaaatgattctgtttctgaaaactttttgatgaaattaaaaaaatgctcatgaaattataacaaaacaagacaaaacccaggaaacaaaaccgtatatacacaaaaacacataaaatggtgggaggaaggagatatggagctaattagggtcagtagttggtatgggaaatagggagtcaataaacaaacaccaacatatgagttaggaaaagaagactatcatgtccccgaaaggaaatcttacctgtagtgtcaacttgcttttgttaaaattgcacatgatttgaaaaaagaaagatgaggaagaacctactaaatgcgcacttggttatcttttaccattcgcttttcttatttgactcacttttccacaattttactaataggagtgaaaaaaaatgagatttaaaaaaaataaaatcaatagagcccaggaaaatgagttgcaagttggttaaatggctgctgtctctgcggcaccagtgacctggggacaaatcccctctccctctgaatcagactgtgagctctgagaggccggagcggctttggaacctagtggttaggcaccctgggtagcctttctctgcttcttgcctgctgtgaggttctgggcaagtcacttggtctctctggactttggttccatttgtcaacagaggaaacaatagacataatatggttgtgagaggtgaattaagcaatgcgtgccaagcccttgtgcaagtactccatgcatggtgggtgggcgctcatgctttgggtggtggtggttttttttttaaccgaaatgtctggttatttcttaggagtttgcacagggctgaaggcagcaggcttgttgttttcagtggttttctttttggcattcttcttcatacctagtgaagacgctcccttctcttcatgtctgctttcactcccacttccctcatcctggccttgacctgtttcccttctttgtgacctgccaccacagacatctagtcatactgttattttggtcctatggattctagagtttttactgaatgccattcactatgatctttgcctagaacagtggttttcaaatgggggcagttttgcctcccaggggaatggctggagacatttttgctgtcatagcatgggggaggagggttcttattagaatctggtgcgtagaggccagggatgcagctaaatatcctgcaaaacacaagacagcccccataacaaagaaatatcccactcaaagtatcgataatgccactgttgagaaaccgtggcctagaccaaggggtgcagagtaggggacagtgactaagggagccaggtatggtctgtgcacccatgacgttgagagatacttgtgaaggctcccattctgcaatttcaccacccccaccccagctggaccaaaagtggtccaatttttagctgaaaggaataatatggtgcttcagttctctattttctgtcttaaggagctttgtagaaaggaccccaaatagatcatttcagcatgtcctctgactcccactgccagactgtgagacctcctttccacagactacagagagaccttgtcacataattgcatcattgatgcatggtgtgctgatacataagtgctttgccatttccagagagctggcacatagattatcttcagatctgttcaacatacctgaggggtggggactgctagaatttgccaccaagcctctctgaagcacctaagtcagacagctaagaggcagtggactcagacctaagccaagacctccctcagctaatgacgacagcgagagctgcagctactgcactggaattgtctcattccagctgacagccctctgctgggcatcaatatgactttttccattttatggatgaagaaaagaaaacaagcaaaggtgaattcgtccatctacagggttgctgtcattgggatatcttattaaatgtaaatataaatcccagacccagcgtaaggagggaaatgttccaggcaccatatgctattggcttgcaaggtttcttcattctaaatttaccattccctcaaaagataaagaccctgagctgagacatacatctttgttttagctaaaaatggaatccataattacactgtttatctgctccatttccttaatgaaggggactgtggaagcccatttctgcttgattatcacaaaggtatcattttggtgaagttacacaaagagaacagagcttgctggcacccggttgtgaacaggggtgcattcacagaaacaaaagaagaggaaggcttttcaaatggcaaatctattcaatcccaattgtctgcacataattactgtgaacccaagtcagtttttctcatcagggacatttgttgctaagggaaaattaaagaaattcagttgtgcggacgctcccttgggtgcttcattgtgagtgggtgataggtcatggtgacatcggtgtaactgggataggaggcacagcagtgtgggctccaggatgtgagggccaggctcgcatctggaccccatcactcactgcagtgtgaccttgggcacgtgtcttcgtttctgagctttagtttcttcatctgcaaaatgggacagtagcaagggcttgtttattctatggtgatgaagattctgcccatgctaagggcctggcacagggtttggcatgtagtaagtgcatagtgaagattgatggtgaaggtggtggtggtttactgtgtgagttaatgatgattgtgatgagtcactctctgtgggacccacggcaggcagtgtctgcttctggaacctcatttttcacttcttgtaaaagaaggaatcagccaaactgagctcagtgatccttgaatacctacagctttgtaagatgtgagttctgaatgcctaagagttaaaacagtatccagtatggctaggcacagtggctcacgcctgtaatcccagcactttgggaagccaaggtgggcggatcactgaggccaggagttcgagactagcctggccaacatggtgcaacccccatctctactaaaaatacaaaaaaactagccaagcatgatggcgcgtgcctgtaatcccagctacttgggaggctaaggtaggagaatcgtttgaacccaggaggcggaggttgcagtgagccgagatcacagcactgtactccagactgggtgacagagtgagactctgtctccaacagcaacaacaacaacaaaaacagtatccggtagattgcaagcagcctcagttattggtttgaaattccatagataaatagtagcaactgcacatatatgtggtgttttccatagcactctagacaaagtaagttctagccatgttatttaaattaaatgtggccatggctttacacgataattcacgtttcccaaaagcacatcaagcaatttccagccaatagtcgtgctgcaaatagacccaacggtttatcactatatcagcatggagtgccctacaattgtcaaaggaaaaagaatttcatctccagaaaggatcagagccaaatgagtctcaccattgagagtattggactcattccattgtaactgggcccagacaattagaattagagatggtgcaattatcaggcttattcaaatcacgtgtgctgcctatctcagcctgacccaaagacctttcttattttttttcattggctgaacttcacagagcagttaaacatatacatgctggagccagacagcccaaggtcaaattttggttctgccacatactcagtggatgaatttgggcaatttaccctcattctttttcctccattcaccatctgcaaaacagataacaactgttcatacctcatagtttattttttaattttgtcatgttttactattaaattaattaattcatattaagcaggacagcatctggaacgcagcaatttcttcataaatgtagctgttatgccatcattagttttttatattccatctgcatgcttgtgccgcatccacttataacctaagctattgtatacttaaatctttatttcatgtcaagggactcactttttgaaattcaaataatttaaatatgaaaagaaagttttataaactgaaaaccagaatgacttgccatacagagaaatctgttgtaaaaatcagaaccatgaaaataaaaagtgttgccaaattgtagccagatcctatgagctttgtgtctggcctcttcagcttaaaaggagaggagagcaaatgagagaaagaagtgaaaaagatagaaaggtgttagaaactccctgctatcaaacaaagatgtccttcttacaaaacagacgcactgaaaaagatttgggaagagaatgatgttcccaccacgtgcctcttctgtgttgttactgttgggcctggagcacctaaaattcaccttaccctccatctgaaaggcaagaaacaaatgtgtcgtaagggacagaggttctcacattttttggtccattttattctattttatttgtttgaaaacactactcaagagagtcattcttgtattcagcaggcatttaatgttccctccaatgagctagcatcttggggacagagggatagtgtctgaaacctggcctttctggagaatgactaccagcactgtacaatcagtgtagtcaggagtcagagaggcagccatttgcttgccttttctaccaaaaagtgatggttcaaaaagcccgactccatgaaatagcacgagtgcagcaggagtcatggtggtagtaaaaacatacacttaagcagcactcacagcgtgccagctactgtccatgtaattcatttgattctcaaacaaccacacaagcttggtactgctattcccatttagcagacgaggacactaagatgtaaaatggttaaaagcttacctgctgtcacacagcagtggcaggattcactgcctggaattggtgcttttagctactacatagctagccagcccctggcctgtggatggtaacatttgctaatgactagcatttcatgaaggctgtgtgcatgcatgtaggtgggcaaaagtgcgtgcaggcttcactctgctaagagctgtgcatgcttttgttcatttattcctcagaacgatcctgtgaggttactatagacatttccccttaatgtcagtgaccagttactgaaaattctatattctgactaaaagagctgatgacgagtctacttccttttgttttaaataacaaagattacaatgcattgtgctccaaccccaaacccccaaccaatttcctcaaaataattaaacctcaatgaaaagcctacatataagaaaccgtcatgctaggatactacaaatgcttagaatcgtttcctgatcaccccacaagtgtttggttgttactcagcagttgttttgtgtgcagtagcactgatggcttgcttagtgacagcaacatcccacatggacagtggacaaaatatctccccgtagttctgcccaccaaccagttatatttggaatgtaacatgagagtttgttcacacatagttttgttaaaatcccattgaattttggaattgaaatgtaaataagatttttttttcctacaaaaacaatagctgaaggctttgtacaaactttggtattggaaatctacaaacattctcttggggaaatgttaaccagtagacctcctgtgaagagtacctatgctactagcatccccattttacaggtgagaacagtgaggattcgctagaagtagcaaagcagggattggtactccaaacttctcttacttcagagccttcacccttaaccactatactatagtgtctatcattattgtcatcattataatgtcaaaatggcttcattagaatgctaccgttatctttgttgttgttgctattattattatcattatttgacatttacttaacactcattatgttccagttactgtactaagtactcaatatacattgttttatttacttctcacatcaacctctgatagaactttattatcctcagtttacaaataagaaaattgagacctagtgaggttttggatcttgcccactggacaatcaactgccaagcctctaccgagtgcctactatgtgctcatccacataccagggttatttagtgctttaaaattgacatgttgtattattggacagagagcttcataatagtaggatttggttcatggctgtgcttcaaagacattacgtattttactatttcatatttcaattttctttctataataaaaccatgcaattgtatcatgacctttgtctcaccctaaataatatggtataacttatattttatacatttattcagatacacatatgtgttgttgctaagtttgagtaagtctgaagtcagagacccagtgactgatgttgtcccagaaagtagaattcttgtgatgcataaatgatagctgatccagccaacacaactgttggaggaattatagcttatagagttgcttggcagatgaaatcacttgactaattagaaaataatgcattatgctgtgctagaaaaatcacagagcagcagaagcggaactgtgttctgggttgctgtgggctgccagtcacaattttgagcctgtgccttgcattctttacctttttttttcccactatccctacagcccagaaattgaaacagaccctggagccttgtgatactgaatatccagcattcgtctctgagcgcaccatcaaggagactacagggaatattgcttgtgaagactgctccaagtaagccatccccccaccctctaaccccctacacctttctgctcagcacagaactttcccagatgggtctgtgtgacttgcaggcacagttacaccaatagaaaacatggctgccctcttgcgtaaggaagtatttctatcagcttggaagaaacaccacttggctttataagatattctagacactgggaagcattcagaatgcatgaaaagacatcctgcagtataggagatttgtaggtcagtttgttcatgttttgagaaagtcttaattggtgctttcttaattgacggttggcaatttgaactgtgtgttcaagaatgtccttacgtatctttactgaaggcacaagccttcaggatttacccaaacctgataaattggaaatgtttcttggtggttgagtatgcatttccctgactgctaatgaggttgagcctcttttaatggctttattggttatttggggtttctgacctctttatttcaattggacagttcccgtctgggtgattggatctactcttactgatttgggtgttctttctctttcggatactatttctttacaatcgtatgcattgtatgtgggtcttcctattgtatggtttgactctttacagatgccttttttttttttttttttaagagatggggtcttactgtgttgcctgggctggtctcaaactcctgggctcaagcagtcctcctgtctcagcctcccaagtagctgggactacaggcacacaatgcatagaaattttctttctttctttctttctttctttctttttttaataagtctagtcatgggctgagttcccatctatatgcagatctgtttccagatcttatggtttcttaatacctatatatcaataccgtatctctttaattattatagctttataatatgacttggtatttaagagaacaagctcctttccttattcttcttctaagttttcttatttattcttggctctttactcttgcatactaattttggaactagcttgttaatttccatgaattctgatagggttttcattaaaatttctgtaagtgatagatcaatttaaagataattactattttttataataaactaagtatatgtctttagttatatgccttttctatgccttttaatacaattttataactttatatatttatacctacacaccccatagtttttcttctatcataaatagtatatacttaaaactacttttctaatttgaaataactagtatatgaacatatcactgatttctgtagattgaatattgtatccaacacactgctaaatgctctttgagatcgacttgtttgtgtatggatgctcttggactttttgcatggacagtaatatcatttgtgaaacattttctttctagtctccgtacttaattattattttctgttttgttgcactatacttctgacacatcgttaaataaaagcgatgagattaggcaaccatgtctcattcctgatttaaaggaagtgcctccaataattacatgttaagtatgtttgctaaaggacttttttattgtcataaaatataaagaatataaaatttaccatttaaccattttaaagtgtataattcaggagcattcagtacattcacagtgttgtgcaaccatcactattaattccataattgctgtagatttttggtagtaacgatttatgaggctgaagaaaacttgtaagaatttttgttgccattgttattgttgaaatctaaattgatattgaattttataagaaaattcaacatccattacaaaaaaattttccttagtttgttaacatgttacattaatatttctaaaattttaaatcatgaaatatatatatacatataaaatacttctaaattttcttggttattcttgactctactcttgcatactaattttggaattagcttattaatttccatgaattctgatagggtttttatatgtataatatatgtattatatgtacatatcgtatgtatgtattatttcatgatatctataatgtatattttgtgattctattttcataaaataaatatataatacatatgtatatgtattatacataatctagtatatattacatatgtatagtatgtatgtattacatactttatatgtagtatatattatatattaatagtatgtagaatgtctaatgtgaaaatatacttgctttttcaggatggaccttcattgtcataaacaggccaggcgcggtggctcacgcctgtaatctcaacactttgggaggccaaggcgggtgtatcacctgaggtcaggagtttgagaccagcctggccaacatggtgaaaccctgcctctactaaaaaatacaaaaattagccaggcatggtggcgggcacctgtaatcccaactactcgggagattgagacaagagaattgcttgaactcaggaggtggaggttgcagtgagccaatatctcagcactgcactccagcccggcaacagagctagattccgtctcaaaaaaaaaaaaagtaataatatatcacacatattgctggattcaatttacttacaccatgaactttttgtttttatgctcaaaaaggagagtggcgatactttttcttccttgcactgtcatttggctttcctattaaggtcattttattgccacaaaattacttacattttccctctttctgtaatatctgtagcatttaatataagatggaatccagtatctgtttcttgaaggctttgtaaaacttataaaactattagtgactggtgggatttgtatgtgtgtgttttttcatgtgtgtatacatttacaactatgaaattagtttcttttgtggttagatatttctggattttctttttccttttgaaatggttttggtgattatatttcttagaaaactgcctgtttcatctcatttttcgaggttattgcaggcattgttgatagtgttttcttttgattaaaaatgttactgtatttgtgattttgcccccttttaaagtttttaattgatcctccctcttgctccctttcctcttgcctccttccctctctctccctttccatactgccagagatgtgttttatctttcttctatgattcttgagtttacattgtttttttattttctaacattttgtctttgatgcttagcttttcaggttcattttatatgtatatagatataagcatatatatgtctaggtatacatttctctctgcattccagtgcatctctaaattatatatatatatatatgtgtgtgtgtatatatatatatatatatgtgtatatatatatgtgtgtgtatatatatatgtgtatatatatatatgtgtgtatatatatatgtgtgtgtatatatatatatatagccttcattcttattcatctctaacaagtttctcatttttaccattttttgatctgtaaatgcttaaatcgtgttttaaaatgtccaaatatatgggagttgaggccatcctttttattactgaagcctaattaaatggccttgtggtctgtataacacatctattttagtatctgtggaaacttgctttgtatttccagtccttgtccacatgtttttgaaagcaagttacattctctaatagctgggtacagggatcaatgtgcgtcctttggacaaagtatacaaattatgtttcaaacctacctttattttcagtctattttagatgtcagttaatctctcaccaggcttatggacgtttttgtgccattcaattcattttgctttctgtattttgaagttatgttacttaccatggacatccctgttcatgattattatagctgcctaagaaatcattcctgttatcactatgtaataaccctctttatacatgaaagtgctttatgccctaatgtctatttggtttgctaatagcagaggtacactagctctattttggtaatacttgctagccatattttcccctttccctccattttcaaccctttttcgtcattttgcactaggattttgttttataaacagaatatagctggatttgaagtttttattatttctgttatctgatagtttaatcttttaaaatttatggtgcttaccaacaagtttggagtatttctaccatcattttatatgctcttattcctcatgttttttctttgttcctttcttccttccttctttctttctttccttccttctttctttctttccttccttccttccttccttttttccttctttctttccttccctccctccctcccttcctccttccttccctccttccttcctctctctccttttcttcgtttctttcccttccattggattgattgggtttttctattcctttttttttttccatactctatgtaaagtacacactattcctttagtagttgccctttgcctttttacgatgtttcaattggtgaggatctcctctctcctccagaacaaacaaaaacttacattttgttaagttggattacctcacatctctttcatataatattttctaaccttctagttctactgtgtttttaacccatgaaataactattactattgctgctgcctatagtaaataacatgtttacctgcattttttatatgtttatagttactctttaatttaaaaaaagcattgctttttgttttacagtacttcagaagtttttccaagaatgatctgagagtgataaattctcattctttgtctaaaatcccaaatttagtatgtactcaacagtgatggtttatctccataacctcaaaattaaaatattttgaagatattccattgtcttctcacttttagccttgtacctttgtaggtagtctgacctctcccccgtttcggatggcttttacagtgttcagtctctctcgaatgttctgaggtttcactgaagtgattccagatataaattcatttctatttttatgtgctttattctggataatttctttaaactcatattccagttcactaatttccttttgatcctgtctggtctgctgcttaaacaatctattgagcttttcatttctagacatttcatttgcttctcttaaaaatatatgttttcttttatacagtcttattcttcggttctctgtaccaaattataaaaaccttttaagattgttctaatagtttaaattttaggagtatcaatcctcttttttcttctatctgtgtttttccatgttagattattggctcatgtattttgtcatttttaactgtgaattgatctctactattaaatattatttctctgggaacagaatagaatttgagtttctcttcacaatatatttgcattttggcttctatcatgtatcctattagtaacgactgcctgggaataattgttatgtaagttttttgtatttaggaatttctgtaccatataattagaatacatatttttcctaagcagcatgtagtttaggcttgaagtttgatttctcatgggcaatattggttttcctattcagagcctcagagagtgccagattatccattttttacacttagcagtaaatttacaagttagctttaagtgtcttctcttgtaagatcttttgtatttaaacatgtttgttttgttttactatttcatctagtgtgtctgagtatttagagcaggatggcttccacatttgcccagtctaccatgttatagtttgtttttctgacttgggggcattctagatccaccacaagaaagtactgaagtgtacggttcatgcaggagccttggaagcaatgggttcagaatgtgagttctgacttcactaattattcactctttgaccttggacaaaaaccttaactccatgaagttctgcttattcctgggtgatttgggggattataatagtaagcatatcatggcttgttataggagttaaagtgagaaaatgtgtgttgtgaatttagcgtaatgcctgaatcagattaagtactcagtaaacagtcacatgtaacatgtgcataaggctatggtctgaatgttggtgtccccccaaaatctacttgttggaacctaatccccaatgtgatagtattaagaagagaggcctttaggagatgattagatcatgaggtctctgcccttatgaaaggtattagtgcccttataaaataagtttgagggaatctgtttgaccttccatcatgtaaagacacagctaaaaggtgttatcattgaggcagaaaacaagccctgactaaacactaagtctgctggtgtcttgatcttgggattcccagcctccaaaactgtgagcaataaatttccgttgtttataaattacccactctgagatattttgttatagcagcctgaatagatggaaacacataacaccaaatatataaaaagtttttaacacctgtaaaccattctgctgaaatgtgaatatttctttccacagtctaatgttatttcactactgtagaattccctgtataaaaagctatagcatatatgtctcagatatgatcacaggccgtgtgtgatggaagggttgttgacaattcatgactctatggttttgtgaggtaaatgccactggttttataatgattgagatcctttttgaccaaatgcatactataccctcagtcatcataactacaaactctatgaggcggccagtatctcttagtgaagataggcacaatcatatttagtagagcgagttagggttcttatttctattctaagtgagaaaaccaatagaactaagataggacattgctagagcaagcagtatttttccttattagaaatcgtaattagaaaataaagaaagaaatgcagttggattaaagaaagtgacctaaagatttcaaactaaagaaataactacctttcattcagtaggaataggaggtcattgcattcctgctgtggtctagaaactgtgctggtgctttggggaatgccaagatggataagatacaaaggtgaaggctgggcgcggtggctcacatctgtaatcccagcactttgggaggctgaggcaggcgtatcacttgaggtcaggagttcgagcccagcctggccaatatggtgaaactccgtctctactaaaaacacaaaaattggccaggcagggtggtatgcgcctgtgatcccagctgctactcgggagctgaggcacaagaattgcttgaacccaggaggcggaggttgcagtgagccaagattgcgccactgcactccagcctgggtgacagaatgagactctatctccaaaaaaaaaaaaaaaaaaaaaaaagcatagttgatgctgaagagatttatatcagtcatggctagtctgttttagctctctaataccacgttgggttgaagactcacaggagattgggtagtaagtggagtaaagctttgcacagtgtgctagcagcagtgaaaagacactgtaggcattggaggattttcctttccaagctttatttcaagaccaccacctggcaggtcagtcatacactgcagaagcagaacaataaagccccgggagtctgggtggggacagaaatggggacttgggttttttctttttttttttagtaaacatttgattgaagcatcacacctacagaaaagtgtccaaactgtaagtttgcagcttgattaatttgcacaaagtgaatattcctgcataaccagcaccctggttaggaagtgaaataacattacaggctcctcagaagcaccgacccccacacctgccctcctctaagtgtaacctcactgaccacaggataaccactctcttgatttctaacatcatggaatggttttgcctgtttcttattgctaacttgtgagatggcaatttggcaggtaagatatgagggctgatttattaatgatgttgaaggaggtctctaaggaattcactcagaaaacaaattagggtcataggaagaaaatgtgaagatagctcaggacttgagtaaacatttcttgatcatctgcttgcatcccagacactgggctgcactttgaggagacagtggtgaatgagacacacaaaattcttgccttcatggagtttgcagatgagtaaccaggcaatgccaatactccatggttagtgccatgattagagagtaaatgttacacgggggtcgcagaaggaaggcttaggtggtcaaaaaaagcttcctggaagaaatagcacctaacacaatatcaccagggtgagaagttgggtatgcacacccgggcagagagaagagcattgtggagatgagagaaattgtggtttggtcaacacattgttagaagttccaggaagctgaatagagagttgtgggtgaggagagatgacagaggggacaagggctgatcaaggcctagggcttgttgcccttttgatcctgtcaaagagaactagtcctttgaaggacttcaaatgctaactaccctgacaccggtatggaaccactgaaaggttttaaggaaaagagtaaaaatgatcagattctagatgatgggaaaaatgacatggtggcctcttgaaacagaaactcctcattcagacagccatttgctacccctttgtcccttccttctctctcaccgctaagcgcgcatgcacgcacacacacacacacgcacacacgctggtcctaacagagcaaacaactcacttgttctcttcctcctcctcttctttttagagattagaaattgacagatcactggggtagctagttggatgagaaatcaatttaagactacttttattcctaatccaaaaatctttgtgaagctttgttatagaattacgatttaatgtttatacaatataaaaaaggacccataaacagtttcgttgagtgcttttgaagagtggaacccttttattcttgtcttttgcatattcttttctctttatccctccttgctccattttatgaaatacagtttattagaagatatatttgagtatttatcaaagtatttatgaagctgttgtttggcattttctgtgagctttgtattctcagaatgcagtatattaaggaggaaaataatgttatttgatttttgttgtcttactcttcttgatgacccatagatgtacaatggccagcatgattggtggcatccagaaagctgaatctgtacctctgctttacatctaattcgcatacaaatttatcagcccttccctggaaggaatgagatttttcaggtctagttctctaagacaattactaatttttgaccaactttgtaggtaacttcaggtcaggggcaatgacattcaaaaataacacaattctgcagcgtttggccaggagtgcgctggaaattgagtttggtgaaaattatagtatttcagaaattacgcagtaagatctttttcataggaaaacatctcgccttccgcaatggaacatacagaaccgtgtccattacaaactagtctcaaggcagcgattactttcctccacaagcaatggcaaaccatagagcaacaatcccaaagaactgagcacttcccacgggaacaggcttcagctgcagtttgcttttggactgtcattaacaatctgcccatctcttagaagagatccgctgaccctggtgtctaaacattttgctagaactaagtaaatcatgtcaggtggttctacccatatagcagaagtcttttcagtcttcagaagtctttgaagaacaaagttgagctgcgtcctactccatttctgtgtcctgtttccagaatcattagatggtttcgtatggaaaatacatcaagaggtgactcagttgctctaaatagaaaccttcaaattggcaactccaaaagtggacatttgtatgtctatagcatagacagatctgttataacatacagggacagtatgtagtgtttttaaagggattttcaaaaatatagggtttattaagaatgcaggagcctaaaagaaaataagaatttacataagaatgtcattagggttggtggtttggctgctctaaccaataatttttgtcatccaataccccactgattattaaattaatctgttattcaaacagcaatcgaaaacaactcagcccatattttctgggcatttgtgactgtcaacaagttggacaaaattggaatctaaaaaggatgtaatgttttactattttccagtatgtttctttccttcttgattacccagccccctttgccaagaaagagattcacaaagacttgcttagaatcaattgcaaaataaatagttagaaccagttaagaaaaataattaatcaaaaataaaactttaaacacatgtaacattttcatttcaacatttcagtgttggcaaaatattaatttctaaggtaaattaggtttttgtttttgttttttagtgtgtgcttttttagttagtatcactcatcacttctcataaaaattatattgccgtcggtttcactttgagatctgtacacaagctttgctcatcttcctggaagccccaaaagctgtggctacagttttcttctctcatcgcttctccccacgcacctttcatttatctgctaagctgaaagaaagtaattggtctcgaagctgtgttgacatgtttcgtgggctacagttcagaaaaccatagttcagggattccattttccaacgaacaactccaatttcctgttgaggtctcaagctgggtgggcaatttaccacaagtctttagactgttctcagtgagtgccctgcaggtgtttctaccaagtgaggcttctggaaatgacctgtataatggatccattgcacaatagggacacagcattttccttgagtaaaggctaagaaggtggcctctgggactgaactatggtctgggctaccacacttactagtgcaaagatcttaacacattatttaaatgccctaaccctcactttgctcatctccaagagggctataagcatagtccatgcctcttaggatctatgtgtgggtttaaaaaaagatgtattactttcatacttagcacagtgcatagtgcagaataaatgcttcataaatggaagacatttttatggagcacagtccacaaacccatctgtgttgacagggatgcaggaaaaccacaggactccttactcgagatttctcagccttgaaggtaaaactaatagtttcagtcaggaaaagtagatggtgaggttttttttgctctgatgagactgtcctcgataaaatagctcttggatttttgccacttcctgggtctacttgagctcttggttgacaagaaatttggaattctggatctgggaatacacatactcaacagtgaccagatccttcattacacaaattagatacagactttgtcagtgggagtacattagtgtcatgaataatataatttgtaggtgttaaaatgtaagttttttaaccacttaacttgcaagcatatgctaatttgttgaaatatttttgtatctcctgctctacagattcttgccaaactaccatactcaatcttgtttaaaacatgtaaatcaataggattcattttcccatgaaataatcagcaatcttttcaaatgggctttgtttaatttctaaacgagtcagctttccactctacagtgagagtagcaccagtggtcatattcttccctttggagattgaaggctcttcatcttatttttccccaagttttcccttgttgtctttacttccttatatcttgccatgttgggtggtaatgcacaaaactgtggattacccaagtcaaaatagttcctgtctcaattctacacagtcatacccaagcagcagtagaggaaaaccagccacatcctccctgtattgcctcctcttctgcatctcagaaacatggtagaagtaacttctgcatcataaaaaccaatttctttccagcattaaaggtttaaaacatgactatcacattgaaaagattttcaatgatatgtcatataatgttgaggctgtgctaatcagtctttaatacaagtctgccttctttttgtattatgggtatggggccaggtttgaataattcaatgctagctcttacaatgaatatcctaattagtgctatatgtttatggttgctaaaatcatcttggctttaaattttaaaaaggggaggaagaggtaaatgcttatcctgggcactttattttgcattgttgaaatagtgccataagatgaaagtggggtccaaagatactataataattgggattaaaacctctggtcaatttttctaccaatccctctgaatctcagttcaatgaagcattttactggggacagggtttccctgattcttttcctcagatgctcagaggaaaaagtaccctatttccagactcaaggatgattacaactttgaggatccagatagaatggatgttgttgtgtaggtgttgctatctttacttgctctttgataagcagtgtttggagggttttagtacaggaaatgttataaattactgttttccctcctgagtccatgatataaaatgagaggggcgcatgtctataatgactaggcaggtttctacctgacatgaattagtctcacaatttcccatttgtacatttcttaatgtgtggggaagaggggtgggagcacatggaagtttgtctgggctcacaacacagtgaggctttcctcttccatgccggagggtaggagaccagcagagccaaggaatatttttagaatgtttatttgcatgtggaatggaggcgtgcagagctgtgtccacactattgacgtctgcaagttgcatttctgcggtgcattgtctccatcctggtggttgtttgtgctgtgactccctctatccctacctcaaagagcagtctgtgttccccccttgctgtgcccaatactgcacctgaagtggcttagaagttgccaaaaccctatagatgtgtgtttattaactctccagcttgccctccatttgttcagcttggaaagagtttatatattcctatgggtattaaaaacccatctgatgtattaaaggagctcaaaggatcaaagcagaaatgctgcctgaaatgcagcatgttgaatatagatacaaagtttctagacccaaaccactttttcaaaggacatcccgtatactcaaaaagaaaattcgttttttaatgatcagcttttctttgggacttgaattttttctttctctttagtaaccgcccaccttttggagcatctctcatgattttgacaagaagaccacttggcaccccagggtagagacagtcattaatttccgtatgttgttcgtgccttggaagatatagcccaagaagcttaaccggctaatgacaaaggttcttagtgcatctgaaagaaaatgggtggagagggtacaagatgaggatcagaatcacctatgatccagaataattagaggtgtagatgatcaaagtcaggaggatgtgggagaaattatcaggataaaatcattgtatcagatgcatctgaaaacattgctgtactgacttttagaaaacaaattatatatttcacgagtgattccatttctattgaagtaggttgcccctgcaatcttggattatttcagtagatctaagcctatatgagaattcatatatgattactgtttatcgaatgcctacttttcaaaaagagttttgtgttcatttccacatttattgttttttccattttttccacttcatctgcctttcaccaaggggaacttgaggctcagaggagtaaactctcctgaccaatctaacagagccactatgtgctggagttgaattaagtccagatctgcccgactctgaaagctgacagagaattcctgttggcatccatgtggatgcctctctgtcatgatactagtcatctgtgtagccacatctcagattgagttcatctcaaaatcagggtttgctttggaaactgaaaattctctgatccacttgatctaagggaagaaatctacaagcatccagtttgacaggagccatacacttctcaatgccagtttcatgcaaatctccattaggtgtacccaggggttctctcacaacacttaccacattactgtttaatcatctctttcttagtcttcctcccccattaaaccaaatcaggtaggttgaaatagtagcaaaaaatactggctttggcgtcatgaagacctgggtttgagatctcaatgccatcagttcctaattgggcaacctttgtcagcaagtcacttcccctcttagttgccgtctgtgcctctgtaaaatgaagatgctaatagcacctacaggggattggcttgatgtgaatattacaaggtattatagaaaaaccggtgcctggcatttagttggtgctcaatagctgggaggtcttatatttaattcattgtagacaggaacatgtcatgttaattcctgtgttcctagcacttaacataggaccttgtgtataaagtagtgctcagaaagctgttgattgagacgaggtttcccaagagaataactttgtaaagtgtgatggggggtgggcgggggaggtagggcgggggttgtgtgtaattctagtagctgagacacctgttattttgtgtgatatttaaaaacaagtatctgttttgaaaacaactagaagctcagattcccaagagctgaaaggcaactttgtgattttccttaggaaaagagaaggtggtccagagaagggagggggcttgcctgaggtcctacagggaggaagccccttaggataccagactcaaagcccagtagttagtcctgatgcttacgaatctttcttcacatcattgcttctccatagctgataatttaaaaacaactattaactaacaaaatacataaataaatatttgtatgaagtagcataaacatggtaagtaactagtgtggtacataggatatgcaataagaattaagtctctgccacccataatcccctgagttctctcctctagaggagcaaccattgtttccaagccctggtgtgtccctctccttgcatagatggcttatgcacatacaggcgcttaggtatattaaatgttttgcaactcatttttttatacaatgataacacagtgtatatattgtactttaccttttatttcacccgatatgtctgaaactatcgtgtcatttatgtgtgtgtgtatatatatatatatatatatatctccttgaagtatctgaaatgtgtatatatacccttaaaatatatataaaatagatatataaaatataaatgtgtatatatacccttaaaaaatatatataatatatattatatattaaatatattttatataatatatattatattaaatatatattatataatatgtattatatattaaatatattttatataatatgtattatatattaaatatatttaatatataatatatattacatattaaatatatttaatatataatatatattacatattaagtatatttaatatataatataaaaatacatatatatttaaggttgtatgagattccattttggggaatgttttcatttaatccagattggactttctgttgttccaaaacattggctacttaactcaaagcagaaaggaatatctttgtataagatgcaatttatctatacattaaattactagaagaattgatgagtcaaagggtatacatgtttataattttgatagatccttggggaaaaaaaatgcactctggagatgtgaaaccaaactcttcttctaccaatttatgagaatgttagttatattcataccaacacggtgtgttatgaaatgttctgctctttttcagtctgatagatgaaagatggaatatcattgttgtcttaacttttctttttatgatcaaatttgaacatctgtcatatgttttaaggttatttatatttccatctctgtgtgccgtctaattatgtccttacttctctttgtctcttaagttgttaagtcttatattgttagtcttttcttttaaggtgctagacatttctattgagtttatatagtaagaaaattaaccatttttcctatatattgcattaaaagcatagctcatcataattattttctcaatacaaaagtagtactggcttatggtagtgttagagaattatctgtagtctcatcattcagcagtataactactgataaaattttggtgtacttgcttccattcatgctttctggttttttttcaaaaatagaacaatattataaatactattttataacatgcctttttaaacttgaaatgtcataagcatatttcattgcctctaaatatttctgcaacataatttcttaaaaaactaaccacacagtatgtggatttactagtttctttaaccaacaccacttaggctcttaatatttggctatagatgaatgtctttactctgaaaactctgtgtatttatgtagtgactctttcaagtatcaattcctagaagtaaaatagtttggaaccattctttattaagataaatctcagtaagagttacaaagtacagacataaatgccatttttttttatttctttctctgttgcctattttgggacataagatataacttttataaagaacaggtattaggtggaaattattttccagaacccttctccaggaagatatagtgccaactgagaatggagcctaagaggcctccgcttttatttctcatattaaggtgctaggagaagcctgtttgtaatttaaattgtaagaaaaacagaaaatacagtagtgatagacatgtttatacatttaatgcttttgttagtaattatttacaaaccttctgatactacaaaagaaacggtattgacttttctagcagggtgccgagttaattatttcaacttaataatgagcaacattgaaatgacattacacaggcctgttgagggagttgcagaaaaacgagcttcagaaatactttgtgaatgtgtgagcatggctataagtacaactaatcaggaaaattaaagcaacatgaaaaattgttgagattaatggaccctgattaaaacaggataaagtgctcaggatgtataaagtcacacagttctctgagcaggcccatgtgttccagaatgcgtatttcagttcacagtaaatctctcaaatgaattatgctaatactattgattctaaccatttcctcactggcctgtttatctatttttatgtcatttctccgttataaaggacatgggcttcaaatgcatgcttatcaagctccgaaaattgaattggtgttgaagaaaggaggcaaaacaaataatagacaatcttgtttgccgtgtttggaaactgagcagggtagaaaatatatacccttgaatggtcagggtatttaggataattctaaaaatgctttccggctatggttctatatgttatgtgaagtggtgaattcagacagactgtccagtaactgatgagtgaggatggatattaaaatttggtagccccagtgatgtagataattcaagagaaaggtcttgaatacacgttaacttgaattctccatgcccctttgctgtgtagatacaacatcagttccaccaggtgttgcctgaagtctgatgtggtgttaacaagtaaagtttgacagggtaaaggtagtgactgtgccaagggcacctgtacctgtgggtgattacattaaaccacttggcatagtctattaaccataaaatgaaaacacccttgaccaggtgcagtggctcccacctgtaatcccagcactttgggaggccagggtgggtagatcacttgaggtgaggagttcgagaccagcctggccaacatggtgaaactctgtctctattaaaaataccagaattagccgggcatgatggtacgcacctgtaatcccagctactcgggaggctgaggcaggagaatcacttgaacctgggagacggaggttgcagtgagttgagattgcaccaagccatacacacaaaacccttgtgttttatttttatttttatttattttattttttattttttattttttatttttttgagacggagtctcactctgttgcccaggctggagtccagtggcgcgatcttggctcactgcaacctccacctcctgggttcaagcgattctcctgcttcagcctcccaagtaactgggattacaggcgtgtgccaccacgcccaactagttgttgtacttttagtagagacagggtttcaccatattggccaggctggtctcgaactcctgactttgtgatccacccacctcggcttcccaaagtgctgggattacaggcgtgagccactgcgctcggccgtgttttatttttaagacagtcactatgagcaaaggaatttgacttttcactttaaaaaatgataccattttttaaattctttttctttcagaatatttagcagtagttcctaaacacatgactagcctccccagaatcatctggggtgcctatagaagtgtatgattctgggtctcagcccagaccacctgattcccagtggccaggaggtgagtctgggaatctgcactttggccaggtttcccaggtgattctgatgcatggccaggctgggaaaacctctgcaggatctcctcgtgtataacacaataggacatgacagtaatttcctggatttcattacccaaagctagactctttctcttttgcataaactaggaaaaagtgaacaaataagacaaaagaagaagaaaccaagggtaaagttataccaaaagtttcatttgcactcctccctctccagagatctagaagttgtctgaagtgatgcaccaccattgtgtgttctgggccacgattaggagatgtggttaaaacacaactggctcagagaaagatggtgaacctacagcttaaagttgaacttatggaaaatgagtggcagttaaaatgggatgagtaatcatacttgagcttggaatcagggcttcaggaaaacctcaaccaactccctcagacatcagtggcacttttgagaggaggaatttcagaacttgtgtcctagggtcttggagaaagcagataatacctccctgcaagagggcgggccgaagataaaccaaagccaggatgcagaagtctgccatcgccatcaatttagagagggtagagagtaaacagcgatggatttctccagatcaccaactctgtgatttttaaagaatgggacaaattaatggtttagggtatcatgacatacatcttccatctcattttagtgtatgttttatttctttttataaattgtcgtctgtgatgtcacttctcccctctgaagcaataagtttgtttgctttccctggcgttaaccatatttttaaaagcaaaaactgtaaggtacaaccctgccgtttttagatgaaagtaaatatattttattaaatgtattcatttatgcaggtttctgctccctgtgaacacatgtgaagacagatactgcagtgagcaccagcgattaaaaatcggataaactggggtcttgtccttgagtctgagatgtagttgtataaccttcctgagaagtcactgtattttcctaacaacttattttgccttaaatttaggactctctctctctttcactaacatccatgataaagcaattgcttctaaaagttgtgctgttttatccaaatagacatgaaatcctcaagcaaccaaagtctgtaatagtcggaaaatttggttgtggtacctagaacaagcagattgaaatccatgctaagacccatgcatgtgtttattttcatttaaaccttttattttctcctccttagattattaaggtgaacatagcagttagcatatttcatcctacaattttcacgcaggagacgcatttttccaatgggttttctatggaataatagcatcaccaaatgcctaaagcagttagggccatggagccaaacacatatgagatgtgttgcatatcaatatatgaacatgcattcacaggcgtgacatcaaatgctatagatgcacatacaaatttgcatctacaggtgtgaacataagtgctatatatacatataaaaacgtgaaatgtggtatacgcacatattaatatgcactcacaggtatataacactgttattccttgttcctcttagaaagttagaattcatgttagcctgttaaagaccctgagaagtcctgcagcgaagaaacctgttgaactctttttaaccaggaattcaccaaacacttatcaacaaaacaggtagaacagttccataaaacccaccttgagaggcactcaggctaataatttccatatagaatggatgggataaaagtcagtcgtggttcttgagatagttataagatagtaaatgccttggaaataatgctaagataagtgaagtagccaggatgctatatatatatatatatatatatatatatatatatatatatatacacacactgaatatataaatattaacctattggtgtgattattaagctgggaggttggggggatggactagactagagctgtgtgccaaaaagaagggagtcatcagccatggaaccgggattgtgaagcagagatgctgccctgcaactttagttacaagaaccagaaaggaagcacatgttggctaccctgaaagatcattctagcatcttcgcaaaatacatttcttgaaatagagccatagaaaaacctaaaagaggcagaagcactcatttcttcacctgtagaaaccaaagaacagtgagtcccatgccaggactttatgatgttcatcttcagaaaatgccccagcctgcagcactatgctattctcttatcccccaaaacgataattcagagattgactacggggaaaagacgcagaagagtgagaaatcagaaaaattctgatttgatgcacaaatctctttttgaccttttaatggtcgttggaaaagatgaattgtgaaatgttttctgtggtagtgtgacagacatacaaaattaggaagaatagtggaatgaaccctgtgtacccatatgcagcttcaacaattgttagtgttttgtcttgaagatataatttatttgataacaactttctcgtctttggcctgtggaagccacttcaacttggtccttgtgaccttttgacagtacctcattagtctttgataatttccttgggttctgcataacaagatattacaggcttattttgtacattttctgcctcaaatctggaatcagccattttcaagggagccttggttttgtttattgggaaatgttatttagagaccacaatctgggcctaagtattcattgctaatggctttgccaaaatcttttaagtctttttaggagtcaaacctaggaaatatatttttgtttagaaagagacaataaatcaagtgctcatgctaatagttctacttccaaatcaaaattgcgtgatttttaattaacttcttggattcatacttgtaccttgtttaagtctactctggctgctgtttaaaaaaaaaataccgtaggctggatggattaaatagtagacatttatttcccacatttttggaggctgggaggtcctagatgagggtgccagcatggtcaggttctggtaacggctctcttctttagttagtgaatggccttcttgctgtatcctcacgtgatagatggagcaggttcgtctctggtttcttcttaggagagcatgtattccaccatgagggctctacccttatgacctcatctaaagctaattacctcccaaaggccctgtctctaaagaccatcacattgcaggtaagagtttcaacatatgactctgggtgggatacagttcaacccatagtgtatctcttttctcttacactaaaaatctcacttcctaaccatatcagcataataattatttaagctacaacatacaaaaataatattcaaatatccatatcaatattgttgctaaaagtagaatgactcagtattgtttaagaattctttgtagtttttttatttttaggctaaatcacaagatggaaatagtttgaaaaaaactgtgttttaaagtcatttaaagcggagtacaatggcacacacctgtagtcccagctactcaggaggctaaagcgggaggatcacttgagcccaggagtctgaggctgcaatgatctatgatcatgccactgtgctccaacctgggcaacatagtgagacctcatctctaataataaaaaagccatttgaaatactttttgctttgtggggttactccaacaatttcttatacaggagggtttttcgttattgttatttttgatttgaggagtgcttttttcagttatacaaaatgtgcatgcacatggtgtcaatgccacaaccacaaaatgaggtaatttagagcagcatcgcttccatttcccaatccttcatcctattttctctctctcctaataggtaatcatttttggtagttggtttagctttttatttagctgttgttaaaatataagaaaaattgaaatgtattcatttttttcatttcttttacaaaatgaagcatatcatacacactcttcagcaccatgcctttcttcatattatattatatgccactgatctttcctcataggttttggaaatgagatttccctcattctgtttcaaagctgcatggtactccattgtatagagatacaattgcttgctcagtctcctactcattgacattcaggttacttcgagccttgtcttattacacatgatcttacaatgaacagcttaatgcatgtataatttaacattttgggatcgattcatagacttgggattgctgggtgaaagggtaaacacatatataatttttctggatattaccaaactcctccatggaagttgtatcattttgcatttcttctagtaatgtatgcaagtacctgttactctttagacttgccagtgggggcattatcaaacccttggatttttttccaatctacagtagatttaaaaaatgctaacttattgtagttccaattttcatttaacttattagaagtgagagtgcagttgtttttacatgtgttagaaataattctttataatgaaatgtgttgcaaatgattttctaaagcttttatttgcttttttcaaaaaatcattctttggtgtttaaaaaatatgtccatattgttcactttctatttcattgcctatttttttgatctttatgatttcttctattttctttgggtttatttgctttttttctagtttcttaaggtgaaagcttagatcattatttttagatcatttttattctctaataaacatttaaatctatacatttccctctaggagtggtgatattccacaggttttgatatgatgccttttactgtcttgtagtttaaatattttctaatctgcattgtgatttcttttggcatgtgttatttagaagtgtgccgcttaattttctaattatttttaaagaatttctagataccttaatatgttttattcctacttcaactctgttgtggttggaaatcatattctgcatgatgtcagtattttaatgtttttcagattaattttatggtccagaatattgctattttggtgaatattccatgtgcattttaaaagaatgtatatttggtagttgttagttgaaatattctataaatgtgaattaggtcaagacattgtgttgttgaaatcttctgtattctaatttatttatggctgaaatgtttgataaaatcccaagagagatttgttaaaatctccaactacaattgtggatctacgtctctctccctttagtctgtaaatttttgtttcattattttgaaatcctgttattatgtgcttacacatctggaatttttatgtcttcttggttatcttattttctgtcttattttcactcttagaatatggccgtctttatctctggtgacatcctttgtctttgtctgatcttaatttagccaaaccagctttcttccacttagaattagcatgttacatcttttaccatctttttaccttccacttatctgtgtctttgtatttaagttctcctctttgaaacagcatatgttttggtctttctttttagctgttattgcttatggtatattttactgtatttttatttacattttcaatttactcgtgataaaattggctccttttgccatagacttctatgagttttgagaaatatttacagttgtgtatttactactataatcaagatatagcaattctatcatctgagaaaattctccttaggtgcactggaggtcagtctattcccagtcaatccattcccccaaccacagctcatcggaaaccatgatatttttgtgaccctacaatttggccttttcctgaatgtcatataagtagaatcatacagaatatagcctttaaaatctgacttcttatatcagcataatgcatttgagatttattcatattactgctggtattcactgtataaatgtatcatattttgtttatccattatccagtagaaggacatttggacactttggagtttttggtgattatgaataaaaccaccataaacattcacatgtaggtgtttgtatgaacataaggttgtcatttcacctgaatgaacctgggagtggggttgctggattgtgtgggaaatgtgtgtttaattgtagaagaaagtaacctccaaactgttttacatagtatctgtaccattttgccttcttgtcagcactgtaggggagttccaggtgttccttatccttgccagctcttggtattattcattccttccttccttccttccttgctccctccctccctccctctctttctttctttctttctttcttgccatttttaagggtaccatagtggcatctcattgtggttttgcacttccatgacgaataatgattttaagattcttttcatgtaattccttgtgatctacatcttattcaatatctgttcaaatgttttgctcattttaaaaaaaaaggtactttgttttctttttattgagttttttactgttgcaaattttttgtatattctagatacaaatcctttgtaaaaacatggcctgcagcttgtcttttcattgtcttaatagtatcttgcacagagcagaaagtattttatttcattgaaatcccattgattgactttttaatggattgtacttttgtttcatatctaagaaatctttgcctaacccaaggtcacaaaagtttttcttctatgctttcttctataaattttatactcgtcagctttacatttaggtctgtgattcatttggaattaatttttatacatggtgtgatttagcattatggatatccaattattccattatcatttgttgaaaagactgtcatttctccactgacttgcctttgaacctttgttgaaattccagtgactatatatgtatacatctgattgaacacattttaatttatctatgtgtctgtcttttctctaatataaaaccgtcttgattattatagcattatattaagtcttgaaatcaagcaagaagaatcctttactttattctttttcaaaatgcctttggctattctagtacatttgcctttccatgtaaattttaaaatacgcttgtctagaaatattttgaaaagtctgctgggattttgtttgaaactgggttgattatatagctcagctggggagccctgacatcttaacacaaccaagtcttccagtccataagcatggtgtaaccatctatttatttcagttgtctttgttttttcatcagtattctatagttttcaatataatgatttttccagtttttaaaacgttatacctatttcttgtacctttagtgctattataaattatactttttcatttcaattacgaactgttcattgctaggatttagaaacatgattgatttttctatatttatctcgtttctgaacttttctaaactaacttattagtcaacacttgcttttttatagcatcttagactattctatgtagacagattatatcgtatgtgcattaagatggttatatttcttcctttccaatctgtatgccttttgtttcttttatttcttctttttttttctctctctcttattgcactgactggaacctccagagtgatggtgaataggagagtgccagcagacaccctggccatgttcccagttttaggggggaaagctgttagaattttatcattaagtctaatgtttactgtttgtttatttcaacatcctttatcaagttaagggagttccttctgttcctaatttcttgagatttatttctcttttatcaaaaaaggttgctaaagtttgtcaaatattttttctcatcatttgagataatcatatggacttctttagtctttagataatttttgaatcttgaactggtcttggattcttggggtaaaccatacttggtcatgatatattgttctattttatattactgtattcaaattgctaatattatgttgtggcttttttactctatgttaataaggtctgttgatatatagtggtttttgtttttgagacagagtttcattcttgttgcccaggctggcatgcagtggtatgatcttggctcactgcaacctccgcctctcaggttcaagtgattctcctgcttcagcctcccaagtagctgtgatgacaggtgcctgccaccatgactggctaattttttgtatttttagtagagatggggtttcaccatgctggctaggctggtcttgaactcctgacctcaggtgatccacccacctcggcctcccaaagtgctgggattacaggcgtgagccaccgcgtcaagcctatagtggtctttttataatgctgtcatctggttttgatatcaggatgatgctagccttataaaaacacttgtgaagtgttctctcctcttttatattctagaagattttgtgtcaaatctgtactacttctcccttaaatgtttagtagaattccccagtgaagacatctgggcttagagatttcgttgtagaaaaagttgtagctatgaattcaatatctttatttaagatcattgaagttagctattatttcttgagtgagctttggtagtttgtgtctttcaaggaatttctttagttcatctaagttattgaatttatgagcattgttttgattgttttgtatttccttattgctcttttagtgtctgtagaatctgtagtaatgtcgtttctttcttactaatagttttagtttatgtcttttctctttttactttgtaatagataaaacagtctaaaagtttattagttttattgatcatttaaaagaaccagctgttagtttgatttctctattgttttctattctcaattctaatattctcttcttcattgttttctttgtcctccttgctttgaattttactcttctttttctagtttcttatagtagaaactcagattattgatttgaggactttcttctttctaatataaacatttaatattagaaattttctctgaagtacttctttaactatatcctaaaaattttgataggttttatgttacacttttttttttaacgtctttttttttattatactttaagttttagggcacatgtgcacattgtgcaggttagttacatatgtatacatgtgccatgctggtgcgctgcacccactaactcgtcatctagcattaggtatatctcccgatgctatccctccccccgtcccccaccccaccacagtccccagagtgtgatattccccttcctgtgtccatgtgacctcattgttcaattcccacctatgagtgagaatatgcagtgtttggttttttgttcttgcgatagtttactgagaatgatgatttccaatttcatccatgtccctacaaaggacatgaactcatcattttttatggctgcatagtattccatggtgtatatgtgccacattttcttaatccagtctatcgttggacatttgggttggttccaagtctttgctattgtgaataatgccgcaataaacatacgtgtgcatgtgtctttatagcagcatgatttatagtcctttgggtatatacccagtaatgggatggctgggtcaaatagtatttctagttctagatccctgaggaatcaccacactgacttccacaatggttgaactagtttacagtcccaccaacagtgtaaaagtgttcctatttctccacatcctctccagcacctgttgtatcctgactttttaatgattgccattctaactggtgtgagatgctatctcactgtggttttgatttgcatttctctgatggccagtgatgatgagcattttttcatgtgttttttggctgcataaatgtcttcttttgagaagtgtctgttcatgtcctttgcccactgtttgatggggttgtttgtttttttcttgtaaatgtgtttgagttcattgtagattctggatattagccctttgtcagatgagtaggttgcaaaaattttctcccattttgtaggttgcctgttcactctgatggtagtttcttttgctgtgcagaagctctttagtttaattagatcccatttgtcaattttgtcttttgttgccattgcttttggtgttttggacatgaagtccttgcccatgcctatgtcctgaatggtaatgcctaggttttcttctagggtttttatggttttaggtctaacatttaagtctttaatccatcttgaattgatttttgtataaggtgtaaggaagggatccagtttcagctttctacatatggctagccagttttcccagcaccatttatgaaatagggaatcctttccccattgcttgtttttctcaggtttgtcaaagatcagatagttgtagatatgcggcgttatttctgagggctctgttctgttccattgatctatatctctgttttggtatcagtaccatgctgttttggttactgtagccttgtagtatagtttgaagtcaggtagcgttatgcctccagctttgttcttttggcttaggattgccttggtgacgtgggctcttttttggttccatacgaactttaaagtagttttttccacttctctgaagaaagtcattggtagctttatggggatggcattgaatctgtaaattaccttgggcagtatggccattttcacgatattgattcttcctacccatgagcatggaatgttcttctgtttgtttgtatcctcttttatttccttgagcagtggtttgtagttctccttgaagaggtccttcacatcccttgtaagttggattcctaggtattttcttctctttgaagcaattgtgaatgggagttcactcatgatttggctctctgtttgtctgttattggtgtataagaatccttgtgatttttgtacattgattttgtatcctgagactttgctgaagttgcttatcagcttaaggagattttgggctgagacaatggggttttctatatatacaatcatgtcatctgctaacagggacaatttgacttcctcttttcctaattgaataccctttatttccttctcctgcctaattgccctggccagaacttccaacactatgttgaataggagtggtgagagagggcatccctgtcttgtgccagttttcaaagggaatgcttccagtttttgcccattcagtatgatattggctgtgggtttgtcatagatagctcttattattttgaaatacgtcccatcagtacctaatttcttgagagtttttagcatgaagggttgttgaatttttgtcaaaggctttttctgcatctattgagataatcatgtggtttttgtctttggctctgtttatatgctggattacatttattgatttgcgtatattgaaccagccttgcatcccagggatgaagcccacttgatcatggtggataagcttttggatgtgctgctggattcgttttgccagtatttgattgaggatttttgcatcaatgttcatcaaggatattggtctaaaattctcttttttggttgtgtctctgccaggctttggtgtcagaataatgctggcctcataaaatgagctagggaggactccctctttttctattgattggaatagtttcagaaggaatggtaccagttcctccttgcacctctgatagaattcggctgtgaatccatctggtcctggactctttttggttggtaaactattgattattgccacaatttcagctcctgttattggtctattcagagattcaacttcttcctggtttagtcttgagagagtgtatgtgtcgaggaatttatccatttcttctggattttctagtttatttgcgtagaggtgtttgtagtattctctgatggtagtttgtatttctgtgggattgctggtgatatcccctttatcattttttattgcatctatttgattcttctctctttttttctttattagtcttgctagcggtctatcaattttgttgatcctttcaaaaaaccagctcctggattcattaattttttgaagggttttttgtgtccctgtttccttccgttctgctctgattttagttatttcttcccttctgctagcttttgaatgtgtttgctcttgcttgtctagttcttctaattgtgatgttagggtgtcaattttggatctttcctgctttctcttgtgggcatttagtgctataaatttccctctacacactgctttgaatgcgtcccagagattctggtatgtcgtgtctttgttctcgttggtttcaaagaacatctttatttctgccttcatttcgttatgtacccagtagtcattcaggagcaggttgttcagtttccatgtagttgagcggttttgagtgagattcttaatcctgagttctagtttgattgcactgtggtctgagagatagtttgttataatttctgttcttttacatttgctgaggagagctttacttcccagtatgtggtcaattttggaataggtgtggtgtggtgctgaaaaaaatgtatattctgttgatttggggtggagagttctgtagatgtctactaggtccgcttggtgcagagctgagttcaattcctgggtatccttgttgactttctgtctcgttgatctgtctgatattgacagtggggtgttaaagtctcccattattaatgtgtgggagtctaagtctctttgtaggtcactgaggacttgctttatgaatctgggtgctcctgtattgggtgcatatatatttaggatagttagctcttcttgttgaattgatccctttaccattatgtaatagccttctttgtctcttttgatctttgttggtttaaagtctgttttatcagagactaggattgcaacccctgcctttttttgttttccattggcttgttagatcttcgtccatccttttattttgagcctatgtgtgtctctgcacgtgagatgggtttcctgaatacagcacactgatgggtcttgactctttatccaatttgccagtctgtgtcttttaattggagcatttagtccatttacatttaaagttaatattgttatgtatgaatttgatcctgtcattttgatgttagctggttattttgctcattagttgatgcagtttcttcctagtctcgatggtctttacattttggcatgattttgcagcggctggtaccggttgttcctttccatgtttagcgcttccttcaggagctcttgtaaggcaggcctggtggtgacagaatctctcagcatttgcttgtctgtaaagtattttatttctccttcacttctgaagcttagtttggctggatatgaaattctgggttgaaaattcttttctttaagaatgttgaatattggcccccactctcttctggcttgtagagtttctgccgagagatccgctgttagtctgatgggcttccctttgagggtaactcgacctttctctctggctgcccttaacattttttccttcatttcaactttggtgaatctgacaattatgtgtcttggagttgctcttctcgaggagtatctttgtggcgttctctgtatttcctgaatctgaacgttggcctgccttgctagattggggaagttctcctggataatatcctgcagagtgttttccatcttggttccattctccccatcactttcaggtacaccaatcagacgtagatttggtcttttcacatagtcccatatttcttggaggctttgctcatttctttttattctcttttctctaaacttcccttctcgcttcatttcattcatttcatcttccattgctgataccctttcttccagttgatcgcattggctcctgaggcttctgcattcttcacgtagttctcgagccttggttttcagctccatcagctcctttaagcacttctctgtattggttattctagttatacattcttctaaatttttttcaaagttttcaacttctttgcctttggtttgaatgtcctcccgtagctcagagtaatttgattgtctgaagccttcttctctcagctcgtcaaagtcattctccatccagctttgttccattgctggtgaggaactgtgttcctttggaggaggagaggtgctctgctttttagaatttccagtttttctgctctgttttttccccatctttgtggttttatctacttttggtctttgatgatggtgatgtacagatgggtttttggtgtggatgtcctttctgtttgttagttttccttctaacagaggggaccctcagctgcaggtctgttggaataccctaccgtgtgaggtgtcagtgtgcccctgctgggggggtgcctcccagttaggctgcccgggcgtcaggggtcagggacccacttgaggaggcagtctgccctttctcagatctccagctgcatgctgggagaaccactgctctcttcaaagctgtcagacagggacatttaagtctgcagaggttactgctgtctttttgtttgtctgtgccctccctccagaggtggaggctacagaggcaggcaggcctccttgagctgtggtgggctccacccagttcgagcttccgggctgctttgtttacctaagcaagcctgggcaatggcgggcgcccctcccccagcctcgctgccgccttgcagtttgatctcagactgctgtgctagcaattagcgagactccgtgggcgtaggaccctccgagccaggtgtgggatataatctcgtggtgcgccgttttttaagcccgtcggaaaagcgcagtattcgggtgggagtgacccgattttccaggtgccgtctgtcacccctttctttgagtcagaaagggaactccctgaccccttgcgcttcccaagtgaggcaatgcctcgccctgcttcgcctcgtgcacggtgcacacacccatgacctgcgcccactgtctggcactccctagtgagatgaacccggtacctcagatggaaatgccgaaatgactgtcttctgcgttgctcactctgggagctgtagactggagctgttcctattcggccatcttggctcctcccctcacacttttcattaaattcaaaatattttctcattttccttatggcttcctctttgaccttgaggttatttaaagctgtatcgttcatttgaaaatatttgagggttttccggaaacttttctgttactgatttggagttctattttattatggtttgggagcattctttgtataattttaattcttttaaaattgtaaagatttgctttgtgatccaaaacatgatctaactttgtgaatattccatatgaacatatatatacatatattctatatatatgtttgtgtgtatatatacacatatatatgtatatacctgtgtgtgtatatatatatatatagtgttgttgttaaagttttctataaatgttacttaggtaaagttggtttctatattcttacagattttctatgtattctactttttctgttcattaccaagagaggagtgttgcagtctccaactgtaattgtagatttgtttatttctctttcaatgtgtattcatttttggtctcatttatttgaggtttggtcattagatacatgcatatttaggattgttatgcctttttagtgaattggctcctctgtcattttgtgatgtccctttttacacttgtagtattccttgttctgaagtacgctttgtctaatattaatatagctactgcaggttcattgtgactaacattttcgtggaatctttccccatcttttagctttaatcttttcagtatgcttacaattaatgtgtgttcttatagataggacgtaattgggtttcaccttttaatccagtatatcaatctaccttttaattggtacatttgggccatttattttttttaaacaacttgccacatatttaatgtagaatatactgaccatatttaaaatgcacatttagaaaatttttgacaaatgtctatatccatgaaactatcaccacaaacaagtatgagtatatccattacctctaaaaatttgtttcttcctctttgtaatccctcccactggtttctctccacctaattctatccccaagttactactgattttctttttgtcactatcgatgagcttgtattttctagaattttatgtaaatggaatcatacagtatgtattctttgttggtccagctccttacataccatttaattattttgagattcaccatgttgtgtagttaatagtttattccttactctgataggattttgattgatttgccttttatttataaaataaggaaatcagtatagatagaactgacatcttaacaacactgggacttctaaccaatgctcatactcaagcttcctttaaattctaacagcaatgattcatgattttcagtagtatatagttcctgcacatctgttgtcagatttctctctaaatctgaatatttttatgctgtttaagtagtattacttcattttccaactgctttttgctaccaaaaaatccaagttgcttagctatattgaattttatatcctgcatcctttctaagcttccttatcatttctagtagtttttggtaggtttgattacatttcctacaaatatggacatacggtcatcaaataaagataatttcttcctttctttaaaatctggatgaattttatgtcctttcttgccttactgcacaggctgtaacttcaagtacaatgtaaaggagaaatggtaaaatcagacatgcttttctgtttctgaccttaaggtaaaagcatttggtcattcatatagaccatttatttttaatgaagttactgatattattggcttgaaatctagcacttttctagttgatttctgcttgttcatcctcttttttttctgtcttttatattgactattttatgattccatttttttcctgctattggcttattgtttatatacttttaagcttttttttgtattggttgcactaaggtttacagtatacatctttaattgctcatgttctatcttcaaataatattaaattgcttcaggtgtagtgtacttaccttaggataatataatcccaattcctgtctcttgttttagcccagtcagtatttcttcagtgtattttttgactcattttctctttactcaactctgggattctaaatacttgtttgttagactacttggtactattttactgcttactgagcttctgttcatttgtgttttaaccttgtttttctctttgttctctaatttgaataatttctattgacctgacttcaggtatactgatcctatcttctgttgcattcagtctgccttgaatatataacactcagtgaattttggatttaaaatattttattctttctgttttaagatttgcatttggttcatttatatagtttacatatttctgctggaattccccgtttcatacctcagtatagccactttctaaagtttaattaatatataaatatattatttaatatactatattataaagtataatatattaccattatctactaactctaatacctgggccagatgttggtctatctttagattgattcttctgttgactattttgtcacattttactatgtgacacaattactgtacaagtttcttcacatgcatagtcagttttgtactttggatattgtggatggtacattgtagatgtcctggattctgttatattcttctagagaatgttgagttttattgtagcatgtgtttaaattaccagtggatcttcttgtgcttttggtggcctggttttaggcttcagaaggtgattttgtttcgtttttgcctctagccctggaatatgatatttagttcttaaaacttttctcctttatcatgtacagaatttatctgtactagttagaactgatacacaggtgttacatttctggatttttgaattttaacttttagagtttaaacaagtcttttttatataagaaacatgctgattaaagagagttggtgtcaaatccaaagaatcattgctcagactactgctgcataatttttcccctgtgttttctgctagtagttttatagtatctggtgttacatgtaagtctttaatctattttgagttgatttttgtacataatgtgcgataaggtccagtttcattcttttgcaagtggatatccagttgtcccacaccatgtgttgaagagactgtccttttctcagtgtgtattccagtaaaaatcagttgaccatatttgtacaggttcatttctgggctctttattctgttccattaatagatgtgtttatttctttgccagaatcatgctgttttaattactatagctttgttgtatagtttgaaattatgtagtatggtgtctccagcttcactgatttttacttatgatggccttggctgttagggacttgtggtgatttctcatgaattttggaattttttttctatttctacggaaaatgaaattggaattttgatagagattgcatttaatctgtggatcagtttgggttggatggacatcttagcaatattgatttttccaatctacaaaaacaggatattttccatttttggtggcttctttagtttctttcatcaatgtttaatagttttaagtgtacaggtctttgacctccttggttaaatttactcctaagctttttttgtggctattataaatgggattgtcctcctcatttcttttttgaatagttcagtgttagtgtacagaaatgctaaaaactacacattggtctgggcaatgtttttttaggtttgaccccaaaagcataggcaacaaaagcaaaaatagacagatgagattgtgtcaaactaaaaagcttcttaacagcaaaggaaacaattaacagtgtgaatagacaatctacagattgagagaaaatgtttgtaagccatataccagaaaaagggtcagtatccaaaatattataaggaattcaaacaactcaacagcaagaaaacaaaacaaaaaccccagttaaaaagtggacaagggacctgaatcaacacttttcaaatgaagacatagaaatggccaatagatctatgaaaaacatgttcaatattagtaatcatcagggttatacaaattaaaatgacaatgagatatcatttcacacctgccagactagctcttattaaaaggatgaaagataacaagtgttgagaaggatgtggagaaaagcgaaactttgtacacttttggtgggaatgtaaattagtacagccattatagaaaactgtatggagtttccttaaaaactaaaaatagaattaccgtaagttgtagccatcctacttccgggtatttacccaaaagatttgaaatcaattttttaaagagatatctgcactcccatctttactgcagcacttttcataatagctaagttatggaatcaacctaagtgttcatcaatagatgaatggataaggaaaatgcagtataagcgcacaatggaatactatttggcattaaaaagaaggaaattctgtcatttgcaacatcatggatggaattggagatcattattctatatgaaataagccagacacagaaagacaaatactgcatgttctcacttatatgtggaatctgaaacaactgaactcatagaaacagagtagcatggtggtaacagaggctgaggtagagggaggaatggggaaatgatgtttgaagggtaaaaaatctcacacaggaagaataaggactgtttctggagttctgttgcacatcatggtgaatatagttaataatagtgtattgtacatttcaaaactgctacaagaataaatctcaaatgctctcaccatgaaacatggtatttgaggtgatggattctgatatgatttggctgtgtccctgcccaaatctcatcttgaattgtagctcccataatttccatgtgtcatgggagggacccggtgggaggtaattgaatcatgggggtaggtctttcctgtgccgctctcgtgatagtgaatagccactatgtaagacgtccctttgctcttccttcgtcttctgccatgattgtgaggcctccccagccacgtggaaccgtgagtcaattaaacctttttcctttataaattatccagtctcaggtatgtctttattagcagcatgagaataatacagatatgtaaacaatcttaatcattccacattttattcataaattataacatcacttcatgccccatgaatatataccagtataaattgtcagtttacaacaaaataattttttaaattataaggtcaagattccccccatcccaccaaaaaagagggttagcaatggagagagctcatggaagaagataatggcaatagctaactgaagtctgttaacagcctggagaaatgtgagattttttttgttaaggaggaagcagtgatgtgaaagccaaatattttagtattatattgggaagggatcttagaaatcacttatgaggtaggaaaactaagaagagggaaggaacaaaacacttctcatggtgatttgcccattaatttaatttcacaatgggagttcaattcaagtccattaacttctgaaccagttggctttctggcataccctgttatctcccacctccatttttttcttcccctttattgcatattgatattctttgtgtggatcaagtatacactgaatgggagaatagttctgatttttcttgtgagagatttttttcctatttagaatacaaaatgctttgttcatgtcatgcaaaatgaacaaaatcctttgttcatgtaatgcaagatgtccaaccttttataaagtaattctcaatgatcaaaattttgacaaatcaccaaaaaaaaatccataggaacagtaatttaaaagtctaaaacattgcctttcatccagtgtttctggaatacatctgtctctcttcaaacgtcttcctggctataggtctctaccacggtactcacactattcagagtgaataatcatgctatgttgtgataagggacagttgaataggggtgggaattatttggagcattgatttcagaagtcagaacccaaagtatagcagactacatgatttgtttaattatttccctggtatattaattcaaagctacaagatatattattcagaaagcttagatagagtcaaagtaggaaggcatgaattcagcttttatttcagtcagcaaaaatgtatcaagctccaattgtagatcaggcagtgatacagctgatgttatagagagattcagagaggattccttctggggagaacccaccccaaggatatacggtaaaaatgagtacatagaagaggacagcaaggccactaaggagggatttcattgttctttcaattaatgatcctggaaaagtttcactccggttttagtttctctggtggtcagcaactgagactatagagtaaaatactgatcactgagatttagttttaaaaatacatatatatatatgttttttttaaatagaaagttattattccatggttcttggtgcttattaaaatgtgattcctattcattgcagaaaattgaaaaatagagaattgtgtaaaaaataaaacaaaaatcacatgccagctcattactcagaactaagaggcagaaacgttacatgctcaggctctgaggccaaatggcctgggtttgaatcccaggttcacatcttattagctctgtgactttgagccattgcctcatctgtaaaatcaggataagtagaaggatttaaacggtgtgatacttcccctccccgccgccgctctttttttctatgcaaaactggcttcatatttagctcaattgttttcttaccattaacatggtacacttaacaaaaatattttgttcatgtaatgcaagatgtccaaccttttataaagtacttctcaatgatcacactttgactttgccagatcacataaagggagatgtttaacttcccagtgaattctttatacttttaaagtgtacacttttattcaggcttcctgatgattcattctgaggctattctattttgctaaatgaacccaacaattcacatggaaattgtgaaagacagtataaaagatgatagaaaatagaagattagaactgtgagttctaggtaatgttaaattctcccttcgatgtagggacagattctcttttctctgtttaccagagaatcattacattactattgcccaaacacatttccacatgagatgttgttgtattgaaacaggagagttatctgacccccctcgcaggaagtgcaacaggggtgtggcttgtctgttctggctgtggctgctgctcaaaccccttatgggatggggaacatgcagacgggcaggtgcaggagccggggtggacacttttgggctccagccccacggtggcaactaaggttgtgtggctgaaactctggaagccccagtgggcatgctacagtgctcttttagctctgctgtccatagacagcttaagtattaaccagcttagtgccctcttggtacccgggttcttgtccagcatccgagaagaatcaggtcacatatggacttgaaggatggtggatacggggattttattgggtgatagaggtggcactcagtgggatggattggggggtggaaagggatggaatgggaagatgatcttcccctggagttcagctatcccacacccgttctcctctccaaccgtccccagccaaactcctttcaacattcagatgctccttttcttctctcctctgccaggctgctcttctgtttatctgctcgtctgcttgtagagcctgaggtttggggtttatatgggtacaggatagggagcatggtggatcaagaggcaatatttgggtgcaaaaacaggaataactgttcccatttagagccaccagtttccaggcttgaaggtggggcctttgtcagggacctgctgtctcctacgcagtatttacttgcctcctgtccatatcagtatgatgggtgagatggcaggctctattgcctgagagctggaatccagatcatacctattaaacctgtgctatcttaaagcaaaatcaggtctaattattgaagttcctcacagagttgggaaatgagtccattttaggtaaagactatcatacaatgcctgtatagggtaagtgctcagtaagtggtagacgatgttggtggtgatggtgatggtgatgatagtcacgatgatggtggtgattagttatatagagtgtaaaggatgaaacaaaggttagcatcaagcaggtctagctctgtagagttttgatactttgagatttgatgtctttttaggatttgggaaagttgtttaacttaatgcttgagtgtcttcatccataaaatggagaaaatgatatttctttgagttggtgtgaagattaaaggggaactgcttagaaaagggtttggcattaagtaaacactccgtaaatgttagctattattgtcattatttataagaaaagacattaatagtttcagtgaaaatagttaacaaactccttactcttcttaaggggattagaagaaaaatggttcatgtcataattaagaagatttactgaagaccctagtacaaagaaaaaaaaaactttgaaaaactaaaatgatagccaagttttaaaaatatcctttgttgtgagctcttttgagattcccttcctctgggataagaaaagaaaactgggcccctcttccttttcattccatgggggtttctctcccatatttcaaacacaaaataccattccttgccatctgccttgggctgacaatgccaaagaacctcctgtccaggttgttttcaagctgtaggtcggcaccataaatctcaataaatccttgtgggctgaggatgagtggaagtcattatcatggctcttactgatgcattctgtctacaacagaataaataccaccatgggacactgccctgcaggcaaagcatccttctggctttttgtgtgctttctccatcagcaagtcacaaatggaatgccttaatgtgtctattgtatacatttttgaataaataagtataacaaagagaatatgctggtccgatttaatcttagcacttaactatgaaaacacagcacatttcccacactggtgaaacggagcagaagaggcctataccagcttggttcttggcaggccatccagggtaaaccgggtgtgagccatgcttatggcttctagggctcagctccctaaagcctagattttccaactgcagggtgatcaggcaatgtagtggtgatgatacggaatttaagagcttatcacttgatatccttttgtttacaaatgacagaggctcaactcaagcaagcttaaacaatacagggaaaagttgagatgtaagcttcagatagggcttactcaagtttcccaaaggttaagaccaagatccaggttttctctatgcatttcccagcaggcatttcctttcatgagcacaggaaagctgccagtggctcctgaggctgaaaatgtgtttgttttcatatgtttggagtagagataagaattctgcgtttcagactgattgaaataacttaggttcagtacccatctctgaacccattgctttctccaggggaaggaattgtaccaatccgcttaggtctagacagcatgcctggacaggactagctcctcagaagcacctgggctgcctgagggaagggtgcagtccttcccagaaggaagatatttgtaccaaaagaagggagattggatatcaaagagaaacttctatagaaggtcagacagggctctttgttttctgaaagtggttgtgaaccttgaagaatggtgagaataaacaaaaattctgggctgcttcaaccttgtactatattctatgaaacccatttgccaaagagcttgtgctactttgaattatatttttatctttcattttttgtttgtttgttttttgagacagtgtcttggtctgttgcccaggctggagtgcagtggcatgatcatagctcactgcagcctcaaagtcctgggctcaagtgatcctcctgcctcagcctcccgagtagctgggactacaggcacacatcatatctgtctttttttttttttttgacatacagcctcactataagtttcccaggctggtctcaaactcctggggttaagcgaccctccttccttggcctctcaaagtgctgggataacaggcatgagccaccacacctggctgtatcttctcattttccattgttattcaatgacgtgtagaaaacaaaaaaaaggaggtctctgccttgctctcagaagtctagtaggaaacaaaattacccaaattacaaaacaaaatattaatagctgtctgtctgcctggttacctagagaaagatggaggaaaggaagacagtagctggcctactcactatactgtattgatgattaaatcaattcctactgccaccaacctgtagaattggaggcgtctgtccttacggcttttgatttgagctcctactgggaaaccatttgttttcttatttgttttgtttatggcttcttaatgtgtttgacctctgcctcccatctgacatttacggaagtctcttattggatctcacttttagctgccctagaaggtaactcttccatttgttttcctgggttacaaaaagagaattttctacacactccaaagcttacagttttcagactatcctttgtgtagcctagagtgctgatgtctgtcctagtcatttccagtgtagcagtacaaggatggcaaagtcgctgtgagcatttaattccacacacaaatagaaagctgtggattttatatgggtgatacaggtacctacaacatgtcatgggagaatggaggaagacatacttccctttgagaaggacggcttaatggagaaagtgacatttaataagtcttttataactgaattggggttctccaaaggtatgggaggaggtggcttcaacactcagaggcttgctggtccccgaaccagcagcatcagtattgcctggtagaaggtgagaaaggcagaatcataggccctaccctagacccactgaacagaaactggcatttcagcaagatcctcaggtcatccgtaagcatactcagcttaagaagcacaattctagaccagacagtctcagccttgaaggatgttggaatcactccagaagcttaaaagaaaaaaaaaaaaagatgccttggtccttcttgcaaggattccaatataatttatgttaggcatggccatcagtagaaaaaaaaatgcaaaatgaaacaaaacaaaatgctcttcaggtgattccagtgagcaaccaaggtaagaattagagctccatctgggtctcagcactatgagagaagcagcatggtgcactcaggggctcgtgggtaggtcagcagcctggatgttggacaggaaggtggctttggggctgggatggttgaacacgtcaggctggagagagagccaggtagaacataaaggccctgtttgcttcactcaatgcagaccatcgggtagatgacaggggctgtggaaaggtgtaaaaagagggatggggtgtcagccttgcacttgggaaggaccacctcaagaatgggccgtggcagggagaccagttggaagataagcctaacattttgcagattagcagggttggcttcataattggccaggcccagtgcaaaataaaattgtgggctgcttgtttaaaaagcaagaaaaatgtattcttaaaggtactaaaaggtaaaactttttccttctttctgtggtctctcttgactgttcatgatttttttatttgccattttaatattgtgctccttcagacacagggctgcacattggcccagtgcttaaggagccctgcccagttacctggtggggtgcgcagctcagcagccgcagggcttctccctcccactagccacaggaccgaggtgctgtgtcctggctggaggaggggactgaatctccccttgccaggggcttgctgtccctactcatggggcacagccagtctacaagggatttcaatctttgcatcaaataccaaatacttagtacctggatcagggtgggcgggaggtttgcccctgctaagtcacccactgaacatgctgtggcactgccagtcactcccaagccttgaccctctgcttgcctggcccaggcccagccaggtgccggtgaggtggggggcagggctctagttgctgggctgagtgcaggaggggaataggtagctgggaacaccctggggagatggaggagagtgcaactgtacatgaggcaagcctcaaccaccccctcctcacagccctcctctctccactcctgtgcatgccccattggcctctggacttcacttataaaacacaaattcaaagacacagttaagaattttaagacagccatgcctgcagaacactgaactccaagtgaccagcccttctgagagtaggcccctctgcaactacactggtcacacccataaagctggccctgcaggatggagatgggaggatggatttgagaggcattaaggacatagtcaaaccagagcatggcaatgttcagggaggaagatgttcagagttcattggagatctctggctgtgtgactgcatagagggtaacaccattaagatatatagggaaacggaggaaattattatggggatgggggcaggggcaagctttagggacctgagaacacttccttcgttccaacagagaatcatctgtcttttctctgatttaattgcataggctggtacttttagaacaaggttaaataacagaggagagtgagcctccttgccttcttctgactctaattagcctgctctgagtgttttatcctaagcatgatgctaaatttgattcacaaaggggtgcctacttctgttcttttaaggattgttttcagggatgggatttctgtccagtgtcttttaggcacctactgaacagatcccacagcactgactgttttcccatgctgtatagggtgtcttacatgaacagattttctgggatgtgaactggatgtcaagtggggattttttgtagtcccagatttaggggaggacaaagtgacaccatgcaccacaagttctagagttggctggcactaatttaaagttggaaatcctaccccaaccccctactcccactccaagcttatttggcttagaaaacgggcctgccttttgtctgccatgtgaacactggtcagggcctacccaacaagaatgtcagtattcatgcaaagaggtatttccttccaacagacacttttacccttaggcatgggtcatgctcctgtggtcccagctccttgggagactgagtgggaaggattgcttgagcccaggaattcaaggctgcagtgagctacgattgcaccactgcactccagcctggacgacagagcaagaccatgtcgaaagaaagaagagagaggagggagagggaaggagaggagaggagaggtggggggaagggaaggaaaggaaggaaagggaaggaaaggaaggaaacgaaagaaaaaaaaattgtttcatgtttctattttcattaagctgggaccactcaataatcttgttcacttgcatttctaggccaatcctcactgtggcatgctatgttgctttttcaatgtcctgctgaagtttagttactacatttcatttgagatcattgcatcaataatcataaggagaaaatatttgtgtatttctcttcctgtccacctccctcctactgtctcataagatggctatccagttatgctagaacacatacaaaataattaagctttccttttaatttaaacagtcaccaaatgtttgctctcaacttatgggcccaggtccatgtagggaaacctggtgcttgctggggcagggcaggtgggggatagggccactttccacctccaaggagaacaggatcctggtggagagccacagtcacgtgctccatccagccggggaacaggacactgtgaacagggccagtgccaaattcagtagctccctgggaccgactcattggctttcattttatctttggataaaatctggagaatctatataaagggtaaaaatctataaagggtgaaatacctcagtctagggtcaaaacgttttaagattctatcctgaccaaatatttttcaagctacagttttgtacccatttaatgaaaggcaagccaaacaagctctccacatgtgcaatcctgtggtcctcgggggatcttatccctgcgttcctccccatcccgcgtgcttgtttggagggagtatgagggaggcatggtgatcgctttcatcatttgctcaggaaagcccctctcggaagatagtgtgcggcaaatactctgtcttgtcacgggaggctgtcttgaaatcgcatcatctttttccctccagttcttcctctgtctgtagtgagtgggaaagggaggactggattatttcagttctggcaatggacacatcaaaattgcttccctctcccaactccctttccctcgaggacctaatttatttcacgcattttgacctatccctgcttagaaacaaccgctgtgattctctgctgaggcatttccctcctcgccttttttggcccccaggcaaacccaccaggccacagcccctctgactatgatgtcagcctggctgctgggcccagctggatggaggtgtgttttatgaagttcaaccctgcaccctgggccataaatacacattgtacacataaatgtacagctaacattgcccaggcccctccgaagcaccatgttaataagcagacagtaagtctttaaaatatggaaaagtagttaatctttccgctggcaatcttttgtagcggggggggcttttctcctctcagtgtagctgctttcagggcttttcaactcctaggatttgggaaagaaagaaggaaagttggctgtgggactttgaaaacaatgctatcttgcatttgctgtcattaagcatctgcactgagtgatcactctgggtctgtcctcaaggagtttgagctctaatcgttccagcacgagacagacagtctgctgcctgtggcaaaagaaccacactagcctgggctccggagggctgcaactttgggtttgaacctctgctctgccccggttactctaggtacttagttttttgtttccctatctgtaaaatgggcataattttatcttattcatatagctgtggtaagagtttacttatcctcgttgagtttcagttttctcttttgtaaaatgggcttgaccctcacagttcactttatacttgttttaagaagacattaatacattctccttgtagagaacttcagggttacagatggagttcaagtgtcccttgacagttactccctgtcacagtcctttcttcagaggtaaccactgttgctggtgtggtgtgtaaccttcctgacctttatttatacatccatgcattagatacatacatacatacatacatacatacataaagacagagcgatagatatataaagaatttatagaaatgtgtcttttttttgtactcactttatgtataaatgccaactacttaccaggcaagtaatcctagaggttacaaaacaaaaagccttaccaagaaattaagatgctcaaatcacttggctgattgaattcatttaaagcatatggctagaagcaaggggaaagaggacggaggatctccctccctgtaacctgtgttatgcactgttcctctattctcctcttctctctcccatcttcccttcctttcccttcccttgtctccaccctctcctgctctgtctcccactgatggtgtagcgaggaggaccacacttgagggtcctcagtctggaacagggcctaagcaggcagaaggtgcctgcagccagcacacacttgccttattggagaggtgcaagggcaagtgtgtagcttgcctgtaacctcctgagcagccacacatttatctgtgtgtctcaggcagagaatggatgttgccagtgagttaatttaaggatgagccaggagagagctatcatcaacctagagacaacaaggtctgtgccttaagaattgagcgcatttaattttacgtggtccttcccttccttcttctctataggaagacacttcatatgttcttcctttactatttctgttcaacttgcatacgctctacttattgagtccatttactctagtctaacatgagtcatgggtcacttaagtgctatctatacctaatacatcttataagttttatccatctcatttatttttcttgtttctctgtagcagaattaaatattcttaaatagtcctaaatattcttaaatactggtactttacgtatagttttacaacattattttcccactcaacgtcttgggtctcctttcatgacagtaaatagagatcctcttcaccctgtcacctggtgccaagaagaccaccgagtggacatattcttgcttattcaatcattgccccattgttggacatttaggtggggtttttgctttttctttcttacagtgaacgttgctaccaagagcatctttgtacatgacttcttgggttctgaacatgagtttactttactgagaagtaaaactacagagaaatagggtgtaaaagatttccactataataataacaaattgtcctcatagtagctataagtttcactttcccacctgtggtatagaagagtattcatttcttcagactttctccattatttgatattatcatagacttaaatttttacccatgtcctagtcaaatcattattttcacttatacttctctaatttttagtgagattgaacccgcttttacctatttgttactcatctgtgtttcctcttctatgaattgtctcacgagtttcgatgctggatatggcaagcaactgcccttcccttttttataaaacccaatcttttatgattgtccagactattctctatatttactcttctgaaagaatcctagaatcatgttctcaaattccataaaatatcctatttttattgaaattgctttgaattaaaaagttaattaagagagaaatgacatatttaaaatatgagtgttcctttccaccaccattgtacttccctccaatttttagctagtatttttatgttcctcagtaaatttgcatcattttcttcattaaggcatatgttttactagatttattcttgggccttttatactgattattgatactatcaatggttctttatttcacaaatatttttcgttggttattgccagtgtcaggctgtggttttatatgctgattatgtaactagccagcttgctgagttcttttattagttctagtagttggtcagtgggttcatgtgggttttctatgaacacagcaatatctgttctctgggtgattgattgggtagaattcacctgggggtagattctcaatgagcatttcagttttgttcatggcaattggtctgctcatgatttttatagcttggccaaatgtagataatttatgctttatccccaaaggcgtgttttctcttaagttctcagattgtttacaatgctatacataatggtcaccaaaaaatgttgaaaatgctcccgtatcttacaggttataatgatactttgtgacttaatttcttgatcatgagtgccaaagttaatttatgtcagtaagcttttaaaccagagtttgattctgttggttatcttcacagtttaattttttattcttctgcctttatcatttcaagttctgtcactgactcaacaaatacttactgagaagttgctctatcccaggcacaaccctaggtgctagagataactcacaacctcaggcagtcaggtgcagccctgttgccttggaaactacagtcttttatgaggggcagacagtaaacaagcaaggaagaagaggcagaaggaaagtggtgaagtcattggtgtccttggcaataactgattcagttggagtgatgaggactacagccttgttggaatacaatttctgaaggagggagatgtgtgaagagagagagttggagggagagagagaaggattatagataattatttttaggagttgtgctataaggaaaaacagagaaatggggtggttgcaggagggagggttaagagacagttttgtttttcctgagctgggagatgtgacagcatgtttgccaacctccaggaagggctagtagatgaggggaaccatttgtgcagcggtcacctatctcttcttttccaccagtcacatccttgaagaagcctgaaagataggctttgcagagggacattaatactcaatccagtggacaagggggaagacaatgtatagggcacaggtgcaggtttatcttcttatttttccagcttcttgatttgaaaactgagtcaaatatttgcgacctttatttattttttctgatgaaaatgtctaaggttctaccgcacaaatgtgaatctgggctattatcaaatctcaaggattgatgaaaggtgttttttaacttttaattttcactgtttatatctttttggtattcatttctaattggactctaccataaaagaagaatgtgtaatcagtactataggttctttggaatgtgttgcagttccctgtgtttgaaaataatttatattctgtgctgtttatatctgaagagttttgggtccatatttttaacagatcatgctttcagaaatcccttttgttatttctttcagttagtatactgtgatcattatgtgactaaagaatcatattttatcttgttagtggattataatactttttggtatgaactcttatttactatattttaatgatatttattttactctgaatatctgtatattactgctaaacctgaacctgtttctttttttgttagcatatttttgatatattttccccttctcctgtgtcattctgttttaggagtgtttgtggcaaacaaacatcataatgtttataaacccaatttaagagtctttgcccttttaatatgtgaatctaacaacctcacagttattgtgattggtaataattttaggcttatactggcagtcatgtgtctgtagggggtgtttaatttctcatgctatccatattgatcaggttttaaatactttttaatatttttcaatgattattcctaatttgaaaatataattttctataaatatctacagagatttagaatatagacactggcatacctttgactgactctcttttttcctcagaacttctttaaatattttactctgtttcttcatcttcagtactcccattgagcaactggttttattctcattctaagtaatttgtttctagggaagcttttaggattggtctgtatctttgatgattgatgataggaagttttttactcatgtttcagtgggctcactcattgaaaagaattggatttgttttttcagtgcaagaaatattttctcctttggatcttttatgtcatattttcatctcttctcctttattgttcatctggcagacacacttggcttaatcttctagtcagccatttgttcttcagagtgttttgtgatcttggttttgtacttgtctttgagactctgttaacctgccgcctcaaaggtggaaattgttggttctctgatgagagctagctatctcaggtagaatatatttatgttgatgggcaaaatccattcagtagaggccaactgctggagtaacattcttgcataggcaagaaagagtctagtgttaaagagggaaggtaaagaagatacagacagatatagatgaaattaattagcaaaacagcaagactgaatatttttctgaggccagatatagttctagacaagagtaggaagagcagagagtaggtgtcccagtgtggatagtggttaaggcattgaggaaacatctttgcacagtggcaagccctgtgaacataactgtggaatattagatgggcattgggcatttatagaaaagaaagaaaccaattgtgttgcagtctctctgagaggcattcatggatcattctcatggatcattcaacatatgaggtggcaacaggttaaaaaagggggagtccctttcccttctttataacgtcccataaagcagaagaacttttcttcattgcatgattttagttcaccatggtgatatactcaaaagaatggaacaaatttattgcgagaaaggcaaatgaagataaaactttggagaaactgacaattttgttaatttccatttgttaagttaaaatctattaaactgaatttaatgaaatattatgcgataggggttctaaccctggagttaaatatttagctaatctggttctggaagaatatgagattttgatccctcatttgttcctccaaagaaagagtcagtagtgttttgtgtttgttaaaggattattttatagtgtctttctttgtcacttcaccatgttgggcaatgtgagaaggaggcactgccaagcttgtttaagttggactaactatcctgatggatcagaaggtcagagcagatatacagccttggctctttcttatagaacttgggctctgggaagtgtgggacctcataaatgactagcattaatctcattcaaaacactgttcctgtatactgggcagacgttgtgcaaagcagtataaggaaggctctaagaagttcactatctcttttgccattggtatgacatagtttcagtctatcgttgagggaaggaggagagaaaacgccacttagaggaacatcaaatgtaacttggggtaatgtttaggctctgggagaaggaaattaggctttgaaagtctgacctcttaaaccttgggaacaggtgattcagccaactctgactcttgtgttttgtacatacagcacttcagtctttccaaggtgagttgtatgagccgcatgtcgtcatagctattgttgttttcctagtgaagctaggtatttgtaagtgaagagcctcatggagaaagaaggtaacattagtagtaaaatagtctccaaaatttgctttacaaaatatggtagttgctaccacccaggagagaagtcttcctcatggctctttaattgacggatggtaaatgactgcctcgctacctcttgttccaacaggtcctttgtcatccagcaaatcccaagcagcaacctgttcatggtggtggtggacagcagctgcctctgtgaatctgtggcccccatcaccatggcacccattgaaatcaggtatatccttttgtgtgcaggtccactcactaccacggaaaccagtaaggggtatcagtggtaaggaaacctgggggagaaatattagagaaggaaaattacatcctttccactgttggagagagagagtagttaagagagttgtcattgccaaattttgacctctgaaatgcagagtagaaaaaagcaatccttggaaacatgccttaactacagtcaacataatgaatcccttaagtgtgaacgtctaaaggcccagaagatcagaaggcgcccagaatcttgtcatggcttccatcctgaggtaagtctgagaactgttcctgtttccttttcccatcagaatcaccacgagagtctcacactggtcaaagaactacagctgaaaagttcactcatgagaaaataatccctttcattcagtaaactgaatctgcaccatcatctaggtcccagaagacttcgttcttacgttagagagggggagagaggtctggggaaagttgaaggtgtcctggagtctatttccgtctaaccaacccctgcctttccccataggagaatgcaagggagtgtgggggtgcgccgagtctccaagcccagacagtcctccttctgctccctctgcttttgatgctcttctcaaggtgacactgactgagatgttctcttactgactgagatgttctcttggcatgctaaatcatggataaactgtgaaccaaaatatggtgcaacatacgagacatgaatatagtccaaccatcagcatctcatcatgattttaaactgtgcgtgatataaactcttaaagatatgttgacaaaaagttatctatcatctttttactttgccagtcatgcaaatgtgagtttgccacatgataatcacccttcatcagaaatgggaccgcaagtggtaggcagtgtcccttctgcttgaaacctattgaaaccaatttaaaactgtgtactttttaaataaagtatattaaaatcataatctccgtgtttggattttatcatcactttattgctaagaacaccaactgaaaacaatgcatgggggaaaaggtccccattccagaaaccaggaaatgatggctgttggcagagcctttgttctaaagcagattctaggcacatatttaacaactgtttttagatgcttcactcactctcagttataaaaatatttatagaagtatatcaaaatatcatctacatgggaagagtttattacatagaaccgtgaattttgttgaactaaacttcaatgaaaatcataatttggatgcaaacacaagctttcatcatattcaagtggtgaattatttgggaatagaaataaagaagtcataaatcctaggaattcggtctgaggagacttgaaggaggaaaagaacaatgattacaaatttggcttctggctttccccataaacaagatatgaaattagatctcaagtatgatgagatgaaactacccagacatgtaagcaagcatttctaaacgctggctcttgacccaaagaaaacagatttcactggatcatggttactaaataaagtgaaataatttccatgcctaggcagagtagagaatgccttactttataggacagacgacatctaaaagttatccagagaatcctacttacttacttaaactcttttaaaaaggggcacattatcctcttgatattttagaaaaactgatgtcactgtactgctttatactaaaatgattccactacattgtttgttgtttgttgttataacttttaaaattaaattactatgcctccagtgctgtttgtttgttctcaacatcacaatactgtaacaggcaaacttgccaaactttcaacagccatggagctatagaattgtgacaattgatgttactcactctgtgcacttggtaaatgaataaattcatttgttgctcatacaaatataaagatagatatattacatttacactgacacattgatatcagataaggagccacaatttattaagctggaatgattgatgataagactctaaacccataaagttacaagtataaagacattctatttacaagtataaagacattctatttatacctaaggtgatgaccagaggaaaattgagcttaatactgagagagatgaatttatcacagatctaggtgatttataggaaaattatttaggtgattttaaaagagagcaagttagatgatttataagagagaaatcatattttaattaatttttaacaaaaataacatcacataacctatgattctccattacagttcttaaaaactggcaacaataagtcaagcatattatgttataatgcccataatttaatgcaaatgatgcaaaatacatgtaatataattacgtataattccactcccagtctcattctaaacgatggagtcatttttgttaaactgtttatggcataaatatagcatccttgagtcacactgcacctcatgccc

SEQ ID NO: 79 - DNA, 129747 bp, Homo sapiens
  source 1..129747: mol_type = genomic DNA
tcttgaatatttggcttcaattgtagtgtttcattttgtcttcccctcagagggcatgaaccatttgctagccagcactgctccctacccaccaccaacaccctatctaatgtacaaatcttttctgccttcagctgtttgacttggtgaaacaagggcagcctgtctcactcatgtagaggctgcttatgatggcatggggcaggaaggaagcgtcacgtgcgatggcctcttgtcaccgccatcctactgtcccaccgtccctaccctgctacactacctggaaatgaaaagggtagcttcagatctcagttgtgccatttgccatgtagcatgggcaagtggccgtttgcttgtctagcctcggtgttctgttaaaatgaggccaacgatacatcctctagagcccacgctgagatgctgtggtttctatagataatttcctcaaacttcccatagtgattggctgggttttctgccaaaccctcgctccaattccgtccttttgtggacttcatttacttttctggccttatgatatgcccactttcttgcctccccgccgcccccgaaccacaacttcactgagcttaatgaagtggttgaagcattttccctgaaagctcttctattaaaatacacaacattattatgtggatttagtagttcacatatccttggtactgaggaaggaagatctgacagcatccttaagttcctggtcctccaaaggtggtgtacaacataagatttcaaaattctgcattctaatttatcaaatgacttaggttccaagttcatgcgtccgagagcaggtgatgggctttagagtgagccaggctgccacctgctgtcctttagtggttctgctaaaagtagaagaggaatcgttctgaccttcaaaggcaaagcttatgagaatattttgttctccaaggtagagaaggttagtttatcagaaatggtttttccttccaatggtcttgaaagggattcccctcggccatgcagagatatggggcccagaggaagcagacaaaaccaggccagaagctgctccagcttcctaagcttggctttttaagagttgataaatttgcctgaaagtgctctacctgtttgggtggggatgataacccttccaaaagataacactgggttatggtcctacagagactgctgtttggtgtctgtgagttggtagttggggtcaaatgcagttggaggtcagaatgtgccttaatgccaaagaatgaacggcaggtgggcggccacggccttggcaggaagtggcagggcgagagttagtgctcaccctgctgtgtgccgcacaggtggtgcctcgtgacacatggttgggacactcagtgatggcagcccaggggctagaaagggctccttgctgctttcttaaccctgctgggcctgttgaacaccttattgttcctggcatctaaattgtaatttctttgtccccacctccatgaaacaaggtaatgtaatgatcgcagttagcatgtatttatttagcgtttagtatatgccaggcagtttcaagcatgttacgtgaatacatcacattcaatcttcatacactcttccggtaatttggaggcaattttcaactctgctgcagtttctataacatgggactaatgatagtacccactttcagggggctgttgtgaggatggaatgagctgaaacatgttatttggtacatgtaaaccttagctgttctagcattattctgccacttaagctgtcttcgagctgcagtgtcttctgctgtaagggggcattaatactgccctcacagggttgttgcaagacatgacggtaagagtgacattctgtaaccgataatgtaagtgtgttttacagagttggcatttggcctactctagaggcaagttagggctatttgctggtaggaaacttgaacagctttgaacttgaactttgaagtgtggaggctgagggtgatggaggagcggggggaagcgccccaaaagccctgcatgctgtccatacccatcactggggtttgttaaatggaaagatttgaggccggcctctcccacatttctccatggctttgcccttaatgttgctctcactgtggagactgttgtctcctgggatccaggtcttggggtttggtcgggggaggaagctgcggggccttgggaccctgggggagatgtgtgtgcgctgggggtgagttcccagatagagcttccctcccagtggaccctgcttagcaagttggaatgttcccacaagttccaaccctaaggatttcactccagggacagagtcaagtagattcttttgtaaatcattggccagaaaagagcacaaccactgctctttttcactattttacagctatttttgccgtcccctgaatgtacatcaatttccatgcagcaattggatgtctcagcctattggcttttcatagatgcaaactttcctttagggctttgtaaagaagttttgggaagttcttcaatagcagcagtttggggacatcacgtgtagccctgtcgatatttcctgaatggatttcattcctttctcagtcttgaccattcccttacccaacccccaccccaacacagtcaaaaccttttcgagcagcagctaggaaggtgagtggcctcccaccatgagcctcactttggggaatctatgctttagttggggcatattcttgccttagcctcatctctgcatttggcctcattctgctgctgcttctcagtacccagaagtccttgggttctaccagagaccactccgacagaaagggtcagaaacaactgaccctttcttggctgggtctggactctggagtacaggaagaactaaattattttgtcttggtccaagctgagctcacgctggcttcccgaagaggagacaggaaggttaggtcagaagtatgctcatgttgagacctagggcagatggtaccgggcaccatgaagcatcttgaaagtggtgccaggtgattggtttcctgttccatccagcattctccggagccaggggccaccagcccaggattgagaggagcgttggcctgggggcgacccaactgcagttagctgcatcccatgtcagtgctgactttttgggatggctctggaaggatcaccttgccaaaacacaggtcaggctgggtggtgtcaccgcaggagttggggcagtagcccccaggcacacacaggcagcaggagtaggggcggcgaggctgaggtgtccgaggcgccgccgcagtcctgggcattctcctgcgaacgcagagcagaggtgacagcgcggcgctcagaggaggaccctcaaaaagggaggggcttccaccactaatttgggccaaaatcctggggaaaggggagttttggaaagccggggaagcactgctacctctcttaggcccctaccttttgggggaaaagcaaaggctggcccctcagcctgggaggggggcaccggccttctctgcttgccctcaggcttggagtggctgcgaggtcatcctctcagaatgtcctcaactctgggagcatctctgatgggggtttctggtcccagcagaccagactgtatgaagcacccggctcagggcctgacacctgggtctgggttctggatccgtaccagccactatgactattatccacgtgacggccccctcacattgctcgatcattcggaactaagtgtagcgggaatgaggacaagatgggaaaactgcattctaattcacctagggcccaagccctaggaagcgtggctcttcgttaaagcaccttgggatcctggttgacttcgtattttaatgacacaggggctctgctgtgctttcacaccagcacttcaacaaatgtgaagggtttttcccaccccactctctggacaccaactgggtgtctgtcctgaaactcaattcaagtctgacactattgagagttagcattagagctcgcaagttacagggctcggtcccacaaggtggccgtcacttcagatgccaatcgcaagccccaggtctcctgtccttctgacagactggctgtaaatctagggttcccatgagcctgtctcaggctccgtgagttgttagcgtggctcactcaactcaggaaggtgcttccctcaccatgacccgtttattataaaggacgcaggtcaggcggctgagtggaagagacacgtaggccaaggcacggggtacgcagagctcccacaccctttcaccaattcggacactctccaaacacagtggctcggggattttatggaggcctcattatgatcattgattaaatctttggccactggtgatcaactcagtctccagcccccttcctttcccagaagccaggggcttggagccaaaagtcccaaccctctaatcctaacttggtgtttcctgtggccagctctcatcctgtctagggcccccagccaccagtcatctaattagcatacaaagatacctctatcattccaagggtcttagaggcacctgtgaaggaaccagggactaagaccaaacactataacaaaagatgcacctatcaccctaatcaggaaataacaagcgttttaggagcttgccaggaatcaggacaaagactaaataaagatctgtttcttattatatcacagtgtcacagggcataaacgcgaatgtttcccccgagaagcacaggcacaggtgtgttcattggcatccctatatgctcctgtctgcaggggcacagacccaggcacagagggtttggggatgaaaatccagcccaccctcgatccgcctcaacccgcacctctggatggaaggcgtggcaggagtctggtcgccggcggagcttctgggagcgcatccggtcacatttgacagaggcattatgtgcagaagccactgttaaggtcaatatctcaggaccggagcccattctgcagactggaaaaaggtctggaagaacctgctctggtgccaccagttgccctgcaagcagctttagggtcaggaggcagcaccggggcccagggaagggttagagaacaaataacggagccctgtggaggacacgggcggtgaaggaggctggccccgctgctcaaaatctgagccctacagacacctcctacagcccccgcccccaccgcacacatccccgagcattgcaggatatatttgacttctgtcgcctcctgcagcactggtgggaagatgctgcagtcacaggtggggtctgtcaccaggaggaggaggttactgttgggaatctgctgcaccacaaataccctgcagcaaagaaagggagtcgaggatggctccgtggcgaccacgagaagggcttctagggaaggaacttctggagactttagtgtggagttagggtggcagggaagcccggaaccatgaggcagggcgggtcggggcagctaagggaacgggcctggcagatggctcagtcctactggctttgctcacaagcctttgctgctgcatttcctttcctagcagactggagacagtgaggaagtccaaactgggccgctttggagagtgcagagttgctattaatatatgcagggacgacaggcgtaaatcaagaccgtccggagcaaatgggcgggcgaggcaacacttgctctgggtgagggtggcgggggcaggcccgggcgaagcggcagcgctggagcttggccaccaggtggcgcagtggccccgcgctcggcgaggccgccctgcgaggagtggcgcggagtggggcggagcccgcccgccaggcccacggccttcccagcagtcccagcggccgcctaccgagcgcctcccctgggatgggcggtctcacacacccaacgtgcacaccacagccgtgtatactctcagccttcacggctctgtatgaggctggtgttgtgcccattttgcagatgagagaatggagactagaggaggcgaagtcacttgcccacggtcataagcgggggagcgcagagccagttttcaattcaggagtgtctactctgaagccctcgcttcactccggagcccgctggctctatcctcgcaccgagcctttgcgacaagtgcacagggaacgctaaccccagccctcaacgctgcacagaacccggggtgaaacccgcgcagcacgacgcgcagggagtgggggagaagggagccccgatgccagcgccgcaggtgccgcactgttaaatggtgtgccacgggcccgggggtctagggaccgcctggcgagcggcacgtctggctgaggcgaccctcgaggaggccgccgcattcccagcgtgggggtcctcccgggcttgggtgcggggggtcagcaggagagacccttccgcgcggcctccctgcctccccggggccagggcgggttataactagcggcttccacacagcaggaagcctgacagaggctgcccgcggggctcccagcgacccgaggacatcgcacacttccggccttctcttctcacactccctctgccttccaagttctccccacgcagctcaggcgcgggcactggcaccgccctgggcaccgcctgagcagggctgggggagacccgccgaagggcccactcgcccagagacgccgtggggtcacggctgcggcctcggcggggtgggctcgacacacagggtcaggcctcgggaccacctctccccatcccggctgtcccggtccccagccgtcctgcccgcctcagaccgtccgcctcctgcgtgtctcctccactgaggacggcgggggaagaccccgggagcgtgggctctgcacttagacgcatcccctcctcccggctgtggagccgtttcccgggggttccggggccctgcccgcacttccgccttgccgagggcgggaggagtgtggcgggacgggcggcgccgccctgcggtcttacttctggcagggcccgcactccacgatcccgttggcctcccggatggccggctggtacacgaacacggggtactccgtgtcgcagggctgcagcgggtcctgcttcttgtgtttgtgggctgcgggcggagaaaggacatcacgccaccgaaggggcctctggcctgcggtgacctcgcctcggcactcccagggccagagttcaccccagtgcatttgcagagggtccctcctcaggcagttctcaggacacgcgtgggaggagccgggcggggggtgaggggagggaagacacccggagtctctggagagggtggcttggcacggggagcgccgcaggggccctgagcctcggtggagggaaagcgcttcctctggggagcctggccctcactgagctgggggcagtgcaccatctccagggccccttccagcactcagatcccgggggagggtctgagcggggagcagaggcagtaggggcaccaaggggtggcttgggggtacttaggcccaccacccctcccttcactgtggacagacgcagtgcagttcctgggcaatcctgccctgctctcccgcacagccaggcccacactccacccattgagcctgagcgcctgcggtgggggcagccgggcaggtgggctccaggcctggggctgcggaagcccagaagccacagccacccggtgcgggactcctcgggggctgcgcgatttgccttagctccctgggacaaggacagtggactcaaccaaaggtggaggcgagtgcctcagccccgctctgcaggacccgagtccgttccctcccggagcctcctgaggtgggcacatggcagagcagggccctgccacacaggctgtctgcatggcccttctgttctcagggcctggctgtggcccccagggatagacctagaggcagggagcacaggtgtgagctaccttcccaggctcatgcagagtcctacaggagagcatgggtctccccagcttccaaatccagaagctcccagccagagctggaaacccagaggggacactagctggcgtgcagaaaactctcaccgagaggagcaagcccacagcggccagggctgtgagttttgtccccagggctgggcacagaagcctgcctgacaatggcagggttgagtggcgtccccagggtcacgcagtggaaggggctgcagcacctacgccccggcctgggactccaagtccagtgcgccttcactggggacactgacatctgtgtaggccagaccagggggaggagctccaggggacaggtaccccagagaagagaaattctgagcaggcagattgagggggatcatcttcaacttttgcaagatgcagctgctgacagagacagaggggacagtgtcctgtcactgacacctagtgactgtgaacaccccagagcagccccacccgatcgcggatgtgagtccagaaggagtctggagacacagcccgaactgccctgagcccaggggcagaggaagccccaagccaaggccagcagaagagaacgaagagcaagccagagagaggaccacagtggagatgaagagatgggataagctggggacagcccaggtggtgggaagttctggaaccccatggcaaaggttctaggaacacggaggaactgagcagagcccgctgaggcaagatggcctcctgcagtcatggagggcccaggcgcccgggcagtgagtgctttgaaaggccaggctcattgccgccctgcacgtgtggccacagccaccgggctttgtgttggggcctctcatggttgctgcctctgggggactctgtcctcagacacagggtcccgcaggggaatcatcctgagagcttcctggggcccctggaacccggagtcccgctgagggctggggtgccgctgtttgcttctccaaggggtgggctggaggttgctcactcatactggctcatggccacccggccacaccaccggcttcctcttggaatcttacgtgttctcacccaaggggaggctggagtttctcattttccctggggcctgaccgtcctcatgtgggatgagaactgggctagactccccagtcccccaacccccaggaatggtactttaaaccaggagagctcagccctgcttggggtcattcctgggacaggtcatggagggtgggttctttgtagctcctgctgcgtccccaacccaccgccagcagggatggcctcagctgggctacttacagtgatggaagacacttttggctggccggaacataagcccagcacagggtggacacggcacaggaaaacatggtggcacatgagggcaggatgtcatggggtggtgatgatggcacatggagtggcggtgtcccaagatgatgtcacacacagagccaggagtgagggatgtgatgagagaaggccacgcagggtgagatgtgaacaacgatgcttcagggtcacctatccccactgtcacccaccccacagggaatggtctcacgttagtggaccaaaatgccactgctcttcagcacatggccctgcagctccgtgcactcaccctcggcccctctgtcgtaccaggagccccagacactccactccagcaggaacctgtcagacacaggactgaatctcggagacctctgagccctcccgacttgggttcccaaggagctggagtatccctgacagcccccggcccatcccctctcctccaggacaccctcttccctgcttgagggctctggttgagcaatgaggtccctcccaggggcagcatgcagggaagaggtggcgtccatgcccagggattgtgccctccttccccggggtctggtagcaagtgggttgtcctggagaccttgcagcctcctgctcaaggacaccctcctaagccaccctcgcatgcagccctccaccagccccgtgtctacccccactcacagcaccagctcctgcagcagccacctggtcgccgtcaagaaggcagaaattggctgggaaggagagagtgcacaccgctcgcacctaggtccaagggtgagggtgccccccccccaccaccagcaccaccctcagagagaccagagagtgggctgccctgccactgggagcaggggcagcagagcacaggccagcagcccagcaccccccatccccccacctcccacctgccctgcagagctgagctagctgggaaatgcctattgcaggtcagacatctcgggtggggttggacatgcccctccaggagacgagtcaagccctcatcctggtgctgcactgctgaggatccctggtgatcaagcggcagtgtcaggggctgaggctggggcaggctgctctctctgtctccgccagaggcactgttgtgtcacaactaccagagcagtccctctgaagccccaaagccagacccagaggcctgcctgggagtgggactgagagcagtggctctgagcagaagatggagatggtcaaggtagggccctggggccagacacccaaggtgggtgagaacagggaccagtgacctcattccaggacagggcagaggactggctggctggctggcagagggaagggctgggtgacactcacgctgaccaggggctgggctgcactgtggtggtgactcgagggtttgcacatggcctgatagtcatacatagtcactctgaaaatcagaagcgggctgtgatgagtccaaagccacccccaccccctgcccctgcctcaggaggctttactagcagagcatccgtttaccgcaattcccaagggcgcctgagctaggacagcagatcagaatacagctcatgctgaaaattacatttctgcacttggaatggtttaaagacaatgaagagcaaatggcttttgccctcggagttggacggttttccctctagggtctgagctgcggagcccctcccagggatgcccacatgcccttacgccctccccacatcatgctgacgccctggctccataaaggttgcttttgcagctctttgggggcacccactgtgggttttggaggtcaggatcctgagatccgccaggaccacttagcgtcagctctcggtttgctgtgtctatttggactggggaggagtgtgccccacttactggctgaacacccccatgctgagcagctgggtcaggacagcaccatccacctcccccagaaatcttcccgtctgtgagagagggacagcagagagagagggagggagagagatggagcaggatggagccttccgagtccagcactatttattcagctcaggtcgaggcttttggtgccagttgggctttccctctgactgcctctcagcataatccagctgaacccttccacccacgcccctgtccggtcctggctccctcctcaccgtccagcctggtgcttcctcaactggaaggagtcacccgctagctgactatgagaccaacgtagaggctgcaatgtgatttttttaatggtacagaattccttggaacaattctgtgtgaatcacttgcagcaaggttaaagaatgttttatgaaactggatttgttttatatgctgtgtgtgtgtgtgtgtgtgtgtgtgtgtgtgtgtgtgtgtgtgttgggtcagatataaaacacgtttctgcaggtcaaggtcagaagcagcgcctgtctcatgcacgctggtgtcctcatcttcccagtgtgagagggctgctgtggcttttgctgtccctccatcacctcccacaatcagtgtgccctgtggatcggtcatttgtcccctccatgacaatgacctaaccggatcccttgccctgtctccattgcccacctgccctcctaactgacctctcctcttgtccctgtggcactgccagagtcatcttactcaaatgcaacatggatgggtcactcttgccttcatttccaaaaaataaaacaggaccctccctcctgcccccggctccccttttgttgtccatcagccagcactttgtggcttctgtgccctgtgccaagcagcggccccctagctggctgagaatggcctcaggccctccactctgccacctctcatggcctctgtacctgccttggcctcttgagtctgccatttcccagcatgtcagggtggcagagcttgggctttggtgttggatttcgactttaatgtaggctgtctttaaaaattggggatagcgtgtgtccggcgtgtggctcccagtaaatacttgaaaaatggcagccatcgttaggaggagaggtccggggtccggcttggctgttctccctgccgattacccttcctctgtcctcatgccaaggaacttctttcctcaccctcgctgggaagtctttctattctaactttcccagccagaacaaggccttcctctgcacaccggcagcctgtggagtcctagtctcactctgcctgataagatatttggttgaaaactgtatgagaacaggaccatgtcttactcatctctgaattccccaaagtgtcttggtacctggacatactcagtcagtgtggaatgttgatagggaagggaggtgggaaccaagctgatggccacgtcaggttcttcatggagagctttctagctgccagggcccaaaatgatgacatgtgtgataactaccaataaaaagaaatgcaaggctggtacaggagctgaggcacatgggcctggccaatctcaaggaaagccaggcattgtctgggtgcccacctggggcctgccctgggcagccaagtagactccagcaagccttctgaagggaacagagatgtattccagacaagggctaggcagaacgcacaactcctgaacacccaatgaacaaccagagaagttctctctcaaataagagatgatggtgcagcttcaggacaataaccccagaactgttatgcccatggttcataatgctgtgacttataatcagccaatatggggccacaggtccccagatgcgcccacaccaggaatctgggatggagtcaggaagtattactttccaaattggacttaaataacaaaacatagtccttacatcctacagtatttcctgtgtaagtggaaatggctgacttataaaattaaaacgtaaggatgcaacccactaaaaatgcatggcaaattgtaatctaaaaatggagggtcaattacaaaagtaagcagcaggaaaacagattcagacaaaggtgctcacacttgtctgtctacactctgctagttctttacctggaatggcctgaccaccaaaaactatttcataataccttttattcataaggcactcaccaggtgagtctgatgcaaagatgaatgaaatggacacgaatcaagagcttcagactagtttgcatggacaggcagggaacacacaaactctcagacatggctggctgaaaaccggcacctcctacggtggtggaaaggagtggcaacctaaagccctggcaggctgcatgaaagaaggcagtggacatggcagcgggacagcagggagggtcaagggcattccagggacacaacagcacatgggaatgtgaaagacattgaaatcctgcctgttcttcacggcgcagccctgaagctctccctggtgcctccagctggagtaaactctctcagctggggctcgctttttgctattctagttactgtgtgtgtgtgtgtgtgtgtgtgtgtgtgtgtgtgtgtgtgtcccctccgtcaccccctcacctgacagcaggattctaggggacagaaatccacttctgtcccacagcaccacaccatgtcctgttcacagttattattccatgcatatttgctgaaggaatgtgtgagggaatgaatgacccgagtcttctgctccctgggaaagtgcagcggggtgcagacaaggcttctgacgaggctggtcttaattcctacaaacctgtcccattctccttcctaattctaggcttattcaccaacaaccctgtggtttagaccctggattctgagaagagaggtccctgagagcaaggatgtgtatcctggacactagaaaaatgtatccccctccataaattactagcttgatttttctaggatttgtcactctggcagaaaatatccattctccccgtcttctttagttaggcagcctgactttaattatggcagccatgtgctcagcgaaaagactacatttcccagtagcccttgcggcagggactggccaatggaatgtgagcagagccgctgggagggacttccgggaagcgggcccaaggcctcctgcctcttccccatcctcgctcttgcgctctgggaagtggactcgaaggcaggagcccctccagctatgctgggatcgtgcggatggggacaggctgggcccaggctgccttcatccattcttttatgagagaataaacctttagttgtttaagccacttctcttctggcagcagaacacaattcctggctgatagtttcttttgaactttgtcagggcaaatccccgactcaaatacagtccctgaacctgcaaagcgaaggtccaaacgtcgacgtgggatgccttgtcgatttaggagccccagaccgcccgtggagtggcacccaaagcatagcacgatgcaggggcctgaccaccccagcccccctttcatgggggacaattcacaaataagcagtggcccgtgggctgcctgaactctggggctgggtcaaaagagtcgaggaccccccctgcctggccttcgagtctggagggaggccaggaggaggaggtcctgtgagcaccacccagaagcctgcgggggaagcagatgggggcagaggcaggcgaccaagtgatgagaggttgggtagtccctcccaggcctggactaatttgcagggctgtgggaggctgtgcccagagagaaggggtgctcttgactctgatgacagatggagtaaatgtcccatggcctccttacctggggacagcctccgtttcttctctaaagatgggagctcatcctcctaaggggtgtggacactcaagtccctgtgtctggctcgggtcgggatcagtttccttttgtctgctcctggcttgtgcagcctcacctgcccctccgtcctccaggctgcagtctcttaaggagtgttttggacactcaggggtgcctgggaggtacgtggaggagcggggtgggggtggggcagcactgcactccccagaaagccacctgaagagcctgcctctgaccacgacaggattaattctattcctggagggcccagtggagcagggccatttgggacgccaggaaggtagaaggagcaccgctgccagggcatgtggtgtcccggaagatggccaaggcaggctgcccagagtggaaaggatggcaacacgtgccaggctgggatagtgacttgaagatgaggagcctgggctgggcgggccgcaggcggcagggaaggtgagagggattcagagaaacaggagccgaggcccagaaaggcatgcctgatgccccctgacgacagagagggatgccctgctctgagggcctgcctggtccggctcactgggctggggtgtggagggagcagggtgctgtgctctgagagatccaggtccctcagggaaaggtgctgggatggggcctcggattttctaggctgcagttgctgccccttgaagatccactttgaagcttccatgggtgggtgccgcccagaagcaaatgacaggaatcggagtccccagattcagggtgacagatccactataaatattacaaagctccacaaagccactgtcattgcctgtccccagctgtctgcttctctttctaggccccacatcgagggttgcaatcttgtcatccataactcttataagaatgagccctggcctggaagagaggccaaatgtctaatcagcaggcctggaacaccgccggtgccaagaaagagccaagcagccactccctggggctggctgcagatgaggcccttgtggtttccccactcactgactacggggaggagggtgtgcaaggactttgtctgggaagaatctttgcatctgtagctcaacaggcttctctctccaggcccctgggtaagccctagcagggacaaggagtcgctggaagcctttgacatatttgcctagtcaggaaagtgacagcagccagctaaagtgcattgagatccacagcagccaggaggcctggggagggttctcaacccaccatgcacccagtcacctggagggcccctttgagcagactgccagaccccaaccccagagtgcttgagtccctaggtctggggtgggaccctggcaaatctgcatctctaacaagctcccagatgctggggcttctgtccttcagccacactggaggcctagagataagcagggaggagcagtgaggaatgaatgagttaggggaggccaggccctgtggccctcgatggcacttgtgtgtttggggaagaggggcaggtttgggtcggttggtgggagttggtggtgggcagactctaaagtggttcacaatgatcccggcctcctgggagtcctgcccttgtgtaagcccctcctcttgagtataggttggacatagtaacttgtttctagcaagcagaatatggtaaaagtgatggggtgtcgcttctgacatcaggtttcaaaagactgtgacttccaccttggtttgctcggtctgatgaaggaactttgagctgtgagctgcactgtgaactttgctgtgagctgccctgtgatgggagaggaggcctccgcctcacagccctggaggacctcaatgctgccaacgtgtgaccagatgcagatccttctccagtcaagcctggacatgacatgacagcagccctggggaccttgatgctgtggcctgtgcaagaccctgagccagccgcacccagatccctcacccacagaaactgccagattttaagtcttctgcttgtaagccactctttttgccatagtttgtgtgcagcaatagataactgctctagagttgttaaatgagtaagtttttttaaaaacagcaaaaacagatggacggacagagggtcggacagctgaacaaatggcattagccccagactctccgccgccctgtcttccactcatctcccagtctagcgcctgctgcctccagccctcactctcaggccagttcagttctccacacggttacccagtgtctgctgtgtgccaggcaccacaccaggcagggtctctggcctagtgccctcccataacccgacacagttcaggctgcatggtcagagctgtccagagtgaggaaggaggaactgggccctgatcacagtgggggagcaagggtgagccaagcacggcgggagcgggggccccagcaggagcctctagaaggtcagttcgtttctgccctgcttcatttcatggagggtttgggatggcatataaaactacacacggggtaaaaaggtaatagaatcattgagaaaatgggggtgaatgagttaagtcaacaaatacattataaaatataaatctctgagtaattgattgctaccacatctaatccaaacttgttctcagtgattttacaatctgtgaagacatgtgagcaaatgtggtctggacagaataggaccaaagtggcccagtgggttatgagagggtccctcgagggaccctggagggaccctggagaggccacgtgctctccagcttctctcaaggctggggtggtttccctccagggccgcctccccgcacggttgtcccgctgcctctggagcaggggctggaaactacagcccgtaggccaagcctggctcactgttgattcatgtgagcccttgatctaagactggcttttccattttcaagtggttggggaaaaaaagtcaaaagattgataacatctcatgacacgtgaaatttatatgaaattcacatttcagtattcaaaggttttactggagcaacgccacctgcatttgctcacagatcgcccatggctgctttcttgctacaacagcagggctgagtctcatgaagctcaaaaccaacatgtgcatccgcccctttaggaaacgctcgcctacccctgctcttgagcttgctctcaggcttggccatcctctccctctgtcctgccacctcccatcccagtgtccaggatgcaagctctctctgggatgccttagcccatgctccggcccttgaaagccaacaccacgggaggcctggggacacggtcagtctcagtcacccagggcgagaggggtcggagcacgaatgagggggcatcagtgatcccagagcctcacaccaaccactggtttcaactcttatcatcactggttttctcccagaacaacggaaaaatacaaaggtccggtgctctgtctggggaggagtgaaatgacgaaaatggggcatgaaagggagaagggggagggtaccagaggcaggcgcccaggtgaccgtgatgctcaattagctgtgtgtcctgcaaagccccgcccacactcccaccaacaggaagttgaacgaaaccatctttggcttctctactcttgtggctgagaactgctgctcgttaagtgggtcatttaaacactaccccaaggagttagatttcatgacccactggtgcccctttgtcctcacttgccctctttcccaagtctccttccgacatccctgctccagttcctgccctgttccgacgacttctttggatccgaagccgcatcccggtcaggccagaccacagccctaccatgcgtggaggtggccttggccacgacctctgcatcagcctccacatcccaggaacttagagccctcagctggggctggcttagacactgtgtagtccagcccccggcgagacacagctaatggaagtcgcttgcccacatcacgtttctaattagtagcaaagctcacacagaaccaaatactatgcccctttccccgaggctcaggcaggaggcggttctgatgcttctgccttgcttcaaggaaatacatctggtgaatatatctggatttgcttcaggtttgaatgggcttctttctcagtttgattcctggctaaaggaataatccattttgaggccccttttggagcccagcaagtataaaaatattattgtactttctctttttcctttctgagcacatgctgggttcagggagatacccacagccagcgggggcggggggaggattaggatgtgcaagccaggcattcaggcgagaaagcatcgcgtccatcccccatttcttctctgacacaccgaaggccgggcgtggtgggtgagagtataattttccataaggtccagacaggacaagaacatgaagtggggaagccatgtcttctgggccccacaatggtagaaaggcaggcgggggttggggaatgatctgataagtgagtgtgcttggatccttgtggggaggccccgagtgaggctgggccagtgtggccaggcagggccctgagatggggtcactgagtggctcctaccaggcacgggaggaggccaggctagtgacagataaaatgaagaagtaatattttctctgactccctgagttgaaaagtgctccaaattctgccttcttgctctgttgactttggtgtcagaacaccatgttcttcagacctttcacctgaattggccccgaacagggttccctcctggggccgtggggctctctttagctggagtggctgcccaatgtctccagtcctcctgccgccctctccccctcattctatatccccagtgactcacctctcgggacctcttggagatcagaatgaacccgttgttgtcgatgacgaagcagtccagatcctgggaggaaacccagaagggaggttatgccagggccctcacccaccccggtcctccagcctgtcccccagctctggaaggcagcgtgggagcttcactgcagggaaggagggcatttgggagagggaagctggcctgccaggaggaccgggcggagggccatggctccctcctccaccttcctcacacgggcagaacttacactgtcctcgcagctctgtgtgcacggcccatccacagtgctgcactggaaggaagaggagagactgaatgtggacactgcatgtgtagtagaaatggcacgtgtaagtgggaatgctgtgtgtgtggtacgtctgcagtgtgtgtgcatgtgtgcatggggtgtgtatctgcacatggagggcacctgtgtggggtgtgggtgtgggatgtgtgtgtcgtatgtggagagcacgtgtgtgaggtgtgtgcatgtgtgtgtctatgtgtggggtgtctgtacgtggagggcacatgcgtgtggtgtgtgttagcattgtgtgcgtggtatgcatgtggtatgtggcctgcgggtgctgcattcggcaggccctgggtggtggaagggcccaggtagcccttctagaggtgcaggctctgcagcccccaggcctcgttgctggtgtggggaggggactttgtgggctctgtggggctcctgcactggctgtctggttgaggcggtgggtgaccgcagccccctgccctccatccctctcgattcactcttgggctccctgcccttgcccagagtcaggcggcagcagcaagtgatgggggccgaggggctcggcgttgcaggagattgaggctgagggagcttgagggagatgaagggggcagctcagaagcccagagggacctgagggctctggggaagcagaggggaaaggagccagtagaacggacaggacgaggccaggcagagctgggaattctcagccagaagccgctgtcgtctctggcatctcttgccagccatcagggcctggaccccggaccttggacggtggatcgaggtggctctcccttttcagcggggaggcatgccagtggctttggagtggcgagaaggggtgactctgggtcgtgccctcagcactgggctggcaggggctggggaccagcgctgaggcccggcctgcaggctggggagctgaggggctgagaagtgtaggggccgggagggcatcctgagagcctcaaggcagtggagcatccaaggggagggagagggggtctcacacccaggggagcgtggtgagtccccagccccgacctggcccgacatcacacctacctgccgcgttgccgcccagaatttgcgctggaggaattccagcttcatttggacgcccgcggctacagggcagaaagagagagggcaaggccagggaagagacggggagagaaaaaaatagagtcaagttaaagagaggaggtgcttccgcaggaactgaggagagagaccgcagcggatgggaggactgagtcagagggcagagtgcaaactggggtttctggggagtgggaggggtgggggaagaacagagacggcagcctctctcgttcccactggaagaagagcgacagaaaatgcccagcagtgatgaggctcccattccagaaaacaacgagggcagattcatcctagatctctgggaactcaaggccggtggatgggacagctcagtctcccctttcccatagatgggaatatagaggccagagagacccacccttttgaccaaatcacgtgaccaagagtggcaccctggaattcagggccgttgccctagcaactcatgggctccttggatcttaacctggtgtaaccattcctttcataccctctgtctgctcaggatcttccctgctttataaggaggctcttttccagctcaaagccaggttcgggtttgcccagggctgcaggtgggttccaggaaactacaggcaccaccagctggcaaatagttctcttttgatgactgtgcttacaagggccacccctgactttctggttcccaaataggcttggagaacccaagcaggtgctcacatatccagagaaatctgggacaaagagctccaggaaaacttggggccaatgaatagaaagaagaggcaggttatattgaaaagaagaagaatttcaaaactaggccagcttcctagtgtctggtataataatatcaaaactgcgctgggcgcttagaacgtgtccagcacctcacatgcatgagtgtattgaatcccacagcaggccagtcctattattattctgactttccaagctgaagaaatggagacttttcagagtcacatggcttgcccaagtcaccagcttgttaatcacagaagcaggactgcagcctgggcctgtctctccctgaagctgcctcctctctggacctggactgagtcctggtgatcgggaaggagcggcgggcacaggcaagccgctgtctgctcaggctcgggtttcctcatctgtgaaacgggaacggatgtggcttcttaaccattacgctgtgtccgtcacagtcattctcacttctcgagtacccagttggtgggagttccagtatggcacagagatacaggattgtgtttttgttttttcactctggaatgatcttagagaaatttgatgggaaaaatgagagcagggaagggtcaaaggccagaggtccagccctgcattttccagggttgtgatctttgcgtttcgtctcctcagctgcaagatgagtcacggttctacttcccctggaagggcagaagttgcataagattgttgaggctcaagcgagataatgtgtgaggctgttactccagactagagccttgatttttaaacttcagcgtgcatcagaatcgcctggaaggtttgttagaaccccgcccccagagtttctccttcagggggtccagggtgggcctgagagtttctgaagtgttcccaggggttgccgatgctgctagtccaggcactatatttagggaacccccgtcctaaagcctcaccaattgaatctcctaagatgatgaagatggcctacatctgtgctgtcctaaacggtagccaacagccacacgtggctactgagaactcggagtgtggctagcacgcctgaggacccgaatttaaaaaacagttaattttaattaacttaaatttaaatagccacgtatggttggtggccagcgttttggacagtgttgttctagagctcatctgagtttgcagatgaagaaaccgaggctttgagaggtacctcccctcccttggagtctcatggcaatcctggggtggtgctccggctggctggccttcttgaacaggtcctgtgatatgggaacatttgagtgctttgggggtgtctttgttgctttgagttccaggtagctgaaaggagtgggctggaaggggacggggagacccatttgctggctcatgacaaagatgagagctgcagacacagcgcacagcggcaggtgaggtgtgctcagggcctagcatggctgtgctcctcctcccgctcatgtgcccctctaaggttgcggggacccctcggtctcttctccttcttttcccttataagaccaccctagacattcattttagacagatttctttcacctgtaggaaaaggctaaatgaaagaggatcatcagagcgaatcacgctactgctcagaatgaccagctcttcgggattgaagaaagcttccttcatcctgtccttggcctccgtggtcaaagaggtctcacattattcctagaatgagactctgcctttccatttgatggctcagtgtcaagtcgcatagaatcatgagatttctgagctggaaggaattctacgattctaacatggggagtctggagagggtgggggtgtaggtgttgaggctccttgggcagaaatggggggagcagggcacagagcatattttcccccacttggttccattccaggctcctccaagccaagctgtgtgtcttgccccgggtgtcctttgcgaaatttagggcattgcaaccgcctattggcatgtcatctgcccttgggtcacagagcgctaatgagtgcgttttacaatcctcttgtaagacaaaaaagttctgcaagtccccactcgacccaagaagtccagctggcttcagctctcactttgaacttagcgtgttctcccccagacctgaccctccttgagacttctccatttcaggacacattttctatctgattgctatcactttccctcctcccatccaacgtctgcacacctcagttccaaaactttataaatctgtccgcttccctccatctccaccgttaccacccttggccaagccaacattgctctcacttggattaatgcaagcacccccgaactggcccccgccttgcatcctgcctctctctgatccattctccacatagagtggatctttctgaagatcaaatcacaccactccctggcttaaaaccctctaatgtcgtcccattgctcttttttgtttgttttgtgtttttgagacagagtctcactctgtcacccaggctggagtgcagtggcacaatctcagctcattgcaacctccacctcccagattcaagtgattctcctgcctcggcctccctagtagctaggattacaggcgcgtgtgataccatgcatggctaatttttgtatttctagtagagatggggtttcgccatgctggccaggctggtctcaaactcttgacctcaagtgatccacctgcctcagcctcccaaagtgctgggactacaggcgtgagtcattatgcctggtccccattgatcttaaaatctaaacttgcaagatggccacaggaactggctctgctgatttctctgatttcatccagaaacacttcacctctcaaacatgttaagctcattctcaccccagggcatttgtaccagctgttctctcctcctggaatgcccttcccctagaactttacatggctggctccttcccatcgtcaggtctcagcccaatatcatctcctagagtggctgtccctggcctcccgagataaagccagccagggggacctccctcactttcactctctaccttattactttttaaattttctaagtgacatgatttgttcatctatttgatttctcatttattgtctgtctggggctaatagcaggcaggggattgagttttgatccccagcacctagaatcgtacctatcacagtgtgactccataaatttttcttgagctacgtaagcaaattcaatttgagccagccacttgacggggaagccgaattctaccaggtctcactgtcccttccctcccagcttcaggggccttgctgacctccttcctctccattttgctgtgccctctcactgtccctgaacttgagatcctggaggtttagctgtgctctgggtcccttgaagacttcggaggcaatccactaagaaatggggatttaagtgagacatgaagaagaacttccttatggcaagaactataagatgttgaagacaagacacagtattgggagtaaaggcggtgaggcacggaaatatatttaccagtgagtcaacggtgttctgccgtgcccaaccgcttgcatcccctggcttgcatcatattgaatccttctgtcaactgcagtcccacaacccaagttgtgcttttccactccagacacccagggaaccgagtcttctcccccaggatccctgctctgctcgttcaggtgagtggttacttgcggggaggactgcccttcctcccatcatctcctgctagccagctgtgtgcaggagacaacaccttatgatattatgtttgcagacaagctcacacctttcggtgaagagaaattcaggcaaagggcccgagggaatgcaaagcactcggcttttcctgttgctttcctgggagttatcaggaaagcttccctcatgcctgtgcatggtgggcccctgttttagaccctgaccttcgtccccaggagggcctgtcatgacctgaaagaggaggacaaatctcagaccccttcctgccccagcgggcctcctgccccagctgacctgggtcccttccctccctcctgtcctccctctctgggctgtcccttgccttccctctctgccctgcctctccacattgatctcgtgccttcctcccaagcagctttcctgtaagatcgcagctcagctccgctggcagacaacctaacaaagagcctcaataaggccagacccgcaggcggcttatcaagatgtacgtctttgctgtgcacacagactgtcacctcggtgctgctgtgtcatcacagaaggcaaaaccaaacaactgtgcatgcacacacacatacatgcacacacatggacacacacatatatgcacacacggacacacatgcatgcacacacacttgcacacacatacccatgcacgcacacatggacacacaggcatacgcacacacttgcacacacatgcatatacacgtgcaccatgcacatgcacacatacgtacacacacatgcacatacatagcatgcacatgaacatatgagtttgcacactgttgagtgctgtggtcccaggagtcagaagctccagctttgccctcctagccctttatctgcttctctttcctcctcctctgtcttgagaacctaaccaggagactgcgtgttgcacgggatagggactgtggggcatgagagggatcatcttttgtaacacaagctgaggacccgacaggtgcacagcgaatacttaggtcacagaaggccagtgccagaagggagaccagagatctcaacccatctcctcattctgcagggcaggaatcccagccagcacaaggcccagggctgctgagtgaactcactagctagctagtcactgagcaacagagtctggagtctgggtcccctgatgcccagtcttgagctctttcatgtcctccattcctcactcagttgacacgaaggcactggggcctgaaggacacggaacaggtgaggccagtccccctgcttgaacagctctgtgtaggaaaggagatgactccctctcccctctcccctctccccacggtctccctctccctctctttccccggtctccctctgatgccgagccgaagctggactgtactgctgccatctcggctcactgcaacctccctgcctgattctcctgcctcagcctgccaagtgcctgcgattgcaggcgtgcgccgccacgcctgactggttttcatatttttttggtggagacggggtttcgctgtgttggccgggctggtctccagctcctaaccgcgagtgatccgccagcctcggcctcccgaggtgccgggattgcagacggagtctggttcactcagtgctcaatggtgcccaggctggagtgcagtggcgtgatctcggctcgctacaacctccacctcccagccgcctgccttggcctcccaaagtgccgagattgcagcctctgcccggccaccaccccgtctgggaagtgaggagcgtctccgcctggccgcccatcgtctgggatgtgaggagcctctctgtctggctgcccagtctgggaagtgaggagcgcctctgcccggccgccatcccatctaggaagtgaggagcgtctctgcccggccgcccatcgtctgagatgtggggagcgcctctgccccaccgccccgtctgggatgtgaggagcgtctcttcccggccgcgaccccgtctgggaagtgaggagcccctccgcccggcagccgccccgtctgagaagtgaggagcgtctccgcccggccgcccctactgggaagtgaggagcccctctgcccggccaccacccagtctgggaggtgtgcccaacagctcattgagaacgggccaggatgacaatggtggctttgtggaatagaaaggcgggaaaggtggggaaaagattgagaaatcggatggttgccgtgtctgtgtagaaagaagtagacatgggagacttttcattttgttctgcactaagaaaaattcctctgtcttgggatcctgttgatctgtgaccttactcccaaccctgtgctcactgaaacatgtgctgtgtccactcagggttaaatggattaagggcggtgcaagatgtgctttgttaaacagatgcttgaaggcagcatgctcgttaaaagtcatcaccactccctaatctcaagtacccagggacacaaacactgcggaaggccgcagggtcctctgcctaggaaaaccagagacctttgttcacttgtttatctgctgaccttccctccactattgtcctatgaccctgccaaatccccctctgcgagaaacacccaagaatgatcaataaaaaataaataaataaattaaaaaaaaaaaaaaagagtcatcaccactccctaatctcaagtacccagggacacaaacactgcggaaggcggcagggccctctgcctaggaaaaccagagacctttgttcacatgtttatctgctgaccttccctccactattgtcctatgaccctgccaaatccccctctccgagaaacacccaagaatgatcaataaatactaaaaaaattaaaaaaaaaaaaaaaaggaaaggagatgaagcagaccacagaaagctcctgcacaacatgagggtggcccaaagagaatgccagagatcggaggaggagcagggccagtcctgtggtgttccggggaaacgtcaccttgcagggggcgtttaaggaagggggaagccacccatgggcaggagagcatttcaggcccagggaagaacacgctttcatggagatggagaagcaggaagtatgtttatggggaggtgggagcctcttttgcttgacagtgggatgtgtgggaggcaccagcatgagaggtcagaggcgggactccccagaggtaaaagacactgcagctcaagccttgtgctgcccggggacccggcagaacggacagaagggagtgagcaggagcatccttctaggggcatcctgagtccagggggttcttctacacccaccccagtcctggctgtgaacccctccagcaaagcaggcaaaatggaagagggacataggacacggtgatatatcgctagcacggtgcttcatctgtctacaggcagtggacgcaaaggaagggggatttagggttcgtgctccaggctggtggggccctggctcccctctagcttggtccctgactcacttggccttcagatcagccacttcccatctcttaggatatcaatttttctgacttgctttgtcctgattggttaagaaagaggcctccaagttcttgaatgacagtctcttcccttcgcatgcctgacccatcacagataagagcaaggagccctgagaagccaagctcgtccctggcactgagaacggtctgcaggctgctgctgcaggctgccctgtgcccaaactcccagcctgccaactctggcattctgcttccctaagtagtcctggcgtcgggtggtcagaccctgaggctcagtgacctctgcatgaccatgtgatccctggctttgtgggggctcagggccctttcctgtagggtcatctggcacatggacatgcctgtgtacccttctttcgtatgaccgagagaagggttcggtttttccttctctcaggcaggatgggagactctgcctcgcatgtctctaaaacaggagaaagaccagcttcccaggggggcctccatcggaacagaagtcagccgcttgctctgtgtctgcgcctgtccctctttccccagatggaggggaagagaggagagaggcacagaagacaggtgcagccgggggggtgagggagagcctggaggcgcaggatggaagatggaggtggtggtgaaaccgctttcctcctccctgtggtcggcagcgattcatccacaggcgcctttttccactgaaatgtgagcgtggccagggtgagcgctgccctcgcggccggccgtggtgcctctggtgtgcgcctgtgtgtgctgctgccgctgtcatcacagatgcaccccagctgtcactccccgctccactctggctcgctgctcgcgcacacgcgtgcgctctcctccctcgcccctttcttccctctctcctctctctctctccctccatccctctctttccttctcagtttgtgactgacccagcagccccgtcccccgtctgccacaagcagtccacctcctggtgctgtgtgctgcgtgccagccgctgctcccgctgagtggagactctggcaccagtgcccactgcgctctgcctgccggtggtgtctggatttctataggaatcccaggagggtcttactggagggttgagagccacctgattgaaggcgtttgcagtcagagtaaagacgggtgagtaccgagtggctggtaggaaggaatggagggttggtggggacagggggtggtcggggcatgggaagtgggcaccggccatctctgccctgcaggaatagctgcagttgcttcctacctgcaggcaattgctggggccgaagaagctgctcgggctcaggcacctgagcatcccaaaggtgcacgacactgggaactctgagcccacagtgctggggacaagagctgtggattctgctgggaagtggggaggagggcagcgctggcgccagatgacagtcccgggtggcatagaaaccggtccctgcagcatgggagaagcagccaagagccttgtgctgtcgttgtgcccggctctgcacagacagccccaagaaactcgggggtcatgggaagcggttgggatggcagtcaggtgctggggacagggccaggtcagaggaaggcttggggtggagggtggcagggaggaggtcctggatgtcagaggcatgggcacagacccaggtcctgggcctccctatagcttgcctgcaggtggctgtccttggacaagggtgtggaggaaccctcccccagatgagcatgggcccactcagctgtgcatgaagcctccctggtgagggtgaggctgggagtgggcaggagagagaagtatcgcagcccttccctgctagcccaagggcaagacaggagaaccaggcccgcgagaacctgctggggtgtcccgcagctgtgcacccagccgtccatctgcaaatgggtcagggagccttagtgggggctggacactgagcttgggtggggggtacacagcggggccaggcctgcctggcttcttgacccacacagggggcatggacaccctgagtagagcgggacagttgctctcaatcccccagacccatttggacagtgctggagagaggagcagcctgaccaggagtcggaagttcacattcctgcacctccctgcaggtctggggctgggttccagttggcggccctgtctctcccccacccccaagctgtccacatttctggggggtgttggcacccggctgtcagggctacttgggcagtgtctctttgtgactcagatgacacccctgcagcttagataactgcctcaggtgggggcggggagggagccgagcacgtggagctgaggcgggggaagtccagctggtagggaaacccgacagcagcttccgagctgccaagaagagcccagcttttcccacccccacctccccaccggcagaaagaaagtctcagcactgccaaaagagggagaccaggaaagccaggcccgcggggaggggtaaggagagaggctgcttaagcagccgatctggtgtctttggggtttgacagaagcttgtctgggcccacgaggagcaaactctgctcccgtttcccaggcaccagagcccaggggccgcctctgggctgctatggcctcagtgggcagtgtaggaaggaggaggggatggcatgtatgtgatggttgggggtgtctgggagttctgggggtgggcagaggagaaaggagccagcatagaggctgtctgcccctctggtcttcctcctttttcccccagccaagcctcctgtgccctgcctgggaataccaccctgagcccagccccagggacaccaccctgagcccggccccagggcccagtggacaccttagcctccttcatgtcagggaccagctcccatgaggggccactcaggaggcttctctgttctgcttcccagagggtctgtttgagattgagaatatttgacaaggaaacgggggtgcaggaggctgggggtgaggatggggcatgtgttttaaaatgaaccaggagggtatatggctgttccaagtacaaatatagagatttttaaaacctggttccttgctgcctgggcagtgtgtgtgatgggggtgatgggcagctgtcctagagggcctgggtgcccagacaggcagcggtaggcggagcccagcctagacggctgtggcagcctcccctgcgtcctggccacatggaatctcgggccgtctttggcccggggctctggctggccactctccgggctccctctcagccttcctggggttggtggaagggcacggcccctgcaggcccagggtgtgggcccagtcgtggctctgcttctctctggccttctgcagagtgaagggggcggcagagtaggctgcaaatgccccctttacccctgagttctgtgactcttccatgctgaggggtatggactcttgaccaaggggagatgccaggggagtgggcacaccctagggctagtgtgatggcccaggagtcaggaattcagaggtggaggcccgatgggcattatctggctgtgtgtcttggatgcttgatgtggagggatagacatgcgcagaagcctgagaggaagggtgcggacaccaggtctgtggtgagtgtgctggaggtttctagctagagtctgagactgattaattaacctccatctgaggagaaatggaaggggcaggtgcatggagcggtccaggctcctgccgtcccaacctagctctctgcagtgagtgagtgcgtgcggctgttccgtgctctgagggggccgagtggggtgctagcagggaggcagctcccactcccagtctcctggggtggctacagcccactcagctccgcatgtggaaccccctgctcctactggggcctcctgctcccccatggcctccccagccttggctcccccagaacagagctccggcctactcccctcacctcagcacacaacccccagccagaaaggtttctagaaagccccccaccttccgtaagatcttggcctcccaggacttcaagaagagaggctgggaagaggagaacctgtcttgcttgcatctcagtccagcaagtcacaaagcctgttccttcatcagggcaatggggacaaaaacagctgccttctcagctccagcgggagtggatcaggcaatgccgtggacactgcagaggaccattcagaggaaaggcggcatcttcctttcctacctctgcctttcctgtacaagtaacccccacgtgtaagcagacagacaactgagttaggagccagagagctcgggctcagagccatatgattccatttgcctaactttaggtgagttatttcatttctggtgcctcagtttcccccatctgcaaaatgatagtaacaagaacactaacctcagagagttgttacaaggattcagaaaactacacaggtttgtgactgtggtaatttttttctccccaggtcccagttagcttctcagtgggtcctggaggctcagggacaggccagcatggtctcctcggtggccgtttgccctgctgagaggtgcccggcctagtcgtatcaaactcaaatatgcatgaaaatcccctggggatcttgttaaaatgcggattctgactcagtcattctggatgggccctgagactaccttcctacaaggctcccaagctagaccaatgccgctggtccatggaccacactttgagttgcaatggtctacactcaaagccccatgtttctggccctccagagttcctcatttgactgctttgagctcttcagccccattctccaatcctggctctctctggaagggaggccagggactccgtggaggcctggccccttatctttggcctccctgtctctaggactgggttaggagcaggcccagcatccagagtggatgaggccatgggacttgcagacaggagatctcgctgtcccccatgctgcaccctgggtagggacttccctcccagactgtgaattcatttcagcagctgtcagtgcctgctgcggcagctgctctccaagcttcccaatgtaggtcaccccctttccttaaggaggctccactcttctgggggtgggaagggtcctttggatggaggcgtgttggtaggcagaggctaaggaactagggagtgctggctgcagccccacctctctctaggagtccctctgtggtgccacacacatatgactggtgttccctgcaagctgcgctatttttcctgctcttgggaaggccctggtgtccaggaggaagcccaagggacccagggaggcaggattagctgctaagagagcacagggcatatccgcatgaacctgggggccttgttttcatcacatttctctaaacaataccaggatcaacagtgtcctgccaccttgcaagacaacacctgtgggtctgcattgtggggacttgccggacttgtgcaggtgacatcccattcgaggctgaagatgggacctccagacctgcacaagaggccgccttcaccagcctgtttgctggttaactcctgggctcacagtgtgggagacactgagggatgggagagggtgaggtgggatgcaaaagaggagcctatccaggggaggcagaagccttaggtggaaactggcctgagcttgggtgggagggcttctccactacctatctgcctgcggcaagccagaaggagtgggagcagacacctggatggggaatccggcctcaacatgggccctgggcagaggaggtgtcttatgggttagggactgctctgcaggggttctctctagaccttagttccaggctggaggcggcttacacatctgtctgttgggggcatttgggaacttagaggcatctcactcagctgcctgagtgttggcatttgagaagtgctggagtgctgccagccaggtgcgtgtgtgcatgtgtgcaagcatgtgggcacatgtatgttagcacatacctagctgcacagctctctgtgggtgtgtgtttgcatcacgtgctgtgtacagagctccaagcacaggtctgggaggcctgtgtgtgtgccctgctctgtgcacacgtaagtatctccctgaaagggccactgctgggtgacagtcgccagggagtgatgagcagcctgcagcctggctctgaaacctgcaatccagtcccggacttaccatgtgaccttggacaagtgatcaacatctctgccttgggtggccgtggactgtgagctcttgatatggacattcttgactgagtaagagagattgtgctgaaggtcagggctcgagggacagagagcgtgcacgctgctgtttgaaggcaggcctgcgagggccgtaggtgtggggcagaaatacatagactccacaggcccggggtgctcaggaatgagaaacaacctcacaggggaggttggtgggatcgggaaagaaagccgtcacaatagacctgctgctgacacccctctcctctggagggaggaactgctgctccctcacgcctgtactgggctcaagtccgagctaggagcaggagcctctgcctgaatttccatggtgatgggcactgggtgtgtcaactctcttcccttcactagattgatcctcatagaaactccaccaagcaggtattgcggtcaccatttctagacagaaagaagctgaggcccagaggctttaagcagtttgtttaaagaacggaccagagatttgaacccagagccccccccccccccccgccaactggcaccaggagcccactggagcctggccttgagacagtggttagagaaccatgacagcaccacgctcaggggctcctccacccctcatgccagggacgtgggtcctcctgaaggctgcatgggcacctgggctgcctgcaatcccacatctgtgcccagtcttgtgacccctctgccaacgcctgcggggccttcggcagactggcaccctcgctgcgtgggggaaggggaggaaagacagccgagagggcggcactccgctcctcagcaggctgcccttgccgggggcagagccgactgtcctgttctaactgagcactgctgtggccgcctgaggagcacccaaggagggaggggccgaggggaccagaggggagaagatgggggcaacagggtttgcagcaggaccctaatgcccgaggggaaacctgcacagacaggccaagattctgggctcagcactgaagcttctcggcagctccatccacctctgggcctgtctttttcactctgatattgtctcctgggctcccagaattccataggcccatgggggcagggagagggaggctgcaaccaggaattacccagggacaaatctggcaaccaaggaaggtcagaggctgggagccgcctggagcagtgggctgacgcagggagcccgtggagggcgaaggagaggggtgcgggcatcctccctccctccctgcccatccccgcccttgccagctgcagcaggtaaacacatgccagtcccctgtccccctctctgatgggctggcagcctgggcctcccatctggaaggaagtggagaccccagcacacagcctgtgtcccagttgggagacactggggggggcagaccctagaaagggtaagtgcccccttgtcccccgcgaaggaagcctgctcctgcgccctggctgcctcagcgcccctactctgcgttctcacctctccttgtgtccctgtctcttcctagcagctgccgcagcatgaacccctgagctgatgagtcttattatagcccggctggcggaagacagagtgctgctattcacctctgcgtgggcgtcggtggtgcagggggaagcagcaggccatccagcggctcacaccctacgcggctgcagctgccaagggcctggcccctgcctccctcgggccatggtgagctgtggcggggctagaggaaccgggacccaggtgaggggagcctccagggacaggtgacagttgtggcctgtgacctcactctgctcacctcggagagatgacctcagtttctccacccataactcaaggaatgcccagatgggagaccaggttgccatgaaaacatctgagtgatcaacatactcgggaggcaacaagaaggcagatgaggctgggtaggcccatgggtgcacccccagctttgcggcactgtgcccgaccctcgggctcctggaaagccgaagcctgccccgcccccatcccaggggcttgaaggcttcctggctcctcttcttcccccacccagggaatcataactgagaggaacaggagagggcatgaggagtgtaaagagacacccgggccctctccctaacccctgggctggaacggggctcccgcgcctgcctgtgctcagtgctcctccctccctcaggactgacaggcggcgcacccaggggctcctctctccccagagcgacagggcccggagagccgtgggcctcaccatgctggcgccgggcagcagccctgggcagaggggcaggctcgccctgcagtggaggcaagtctcctgtgagtacacccctggcctcggaggggggtgcgggttgggtgggggtgccgaggtgactgtaggtagcgccatatgggaccttagccacactcaggctgcagggaggcctacgccagatcttcctggggtacccgaggctatgttctgggaagccagggtcacgcccacggtgacagcatccctgccagtcagagtcaccgctgagtgctgagtggttagacctggagctggaggccacgacagttgttctacctcccccaggtaagtctctgtgagcttgctggggtccccaacaggagaagagctctgctggaatgcaggcctgctgagtcttaaacagcctcactggtgcctgagcttgtcggcctgtgtcacagactgcggcgagcccttttgctcccgtggggaactgcccccttggctggcctcggccaggagctgggtcagcttggagatgtctcttatgctccttatgcctccgctttcccaactctcggtagaggacctagtgggctcgtgggatgcggcgctggaagagactttggggagtgggtccaacccctcctgcatataggcagactgagccgtccatttaccaaaaaggggaggaagcgtgaatgaaggcaacacttggcagctgtcagggtgaaaggagccctgagaattctctttatatgtggcaaagggaccaggtcagcaagggctggtctgcccaaggctacacggtggcagggaggaaacggtcccgcgggacggcattccgcctgacttcccgctctgatccagcacccaacacgggcagcctgaattattcaccatgtgagagaggctggcccctgagtgactcagatctcctttcagcctcattctagaatcactcaacacctcgcaatacgggcttatgttttcttgtcactggagcttttatgccaccttgatctccagggaggtggggggcgcagggagtcgctcttccgcagcggctctcttagcctgctgtcaggcccttctctgggaggggcgagcggcttctggtgatgcagatccttttgagagggagctgaatgcgttggattttatttcctggggaaagtcaagtctgaagaatgctgattttcaaatggcttggggtggtggtatggggctggctgatctggtagcagacgggctcagaggggtgagagggtgagcggagacatgaggtaacccaagatggccagaaaaagggtctccggtggcttccatggctgtacctgtgctcacttctcgccaagaacagtgaggcttgctgttaggctgcagggaggcctgggccagatctagccacgtgtcagctctcagctgtcatcgatcctccaggcagggaaggggagagtctcatcctgttccttcaagctccaccctttgggacagcagacacccagacccctactggacaagactcaaggctgttcagacccagctcacagcccatcggcccaccccgacctgggacagccaggtcccaggtcccatgtcagggtgggccgatgggctgtgagctgggtctgaacttctccatcagttctctggctggggtcttttctctaggctgggtggaactgacctcggctgggctgacctggtggggctgaactattttgaattcttcccagttctctttcacgatgagcaggcttctctgctactcaggaggacacttaggggtttttgaggccactattggaaagggctgctgcataatggaaggcactgctctgatgtgattgttccctgagggttacttctcccagccctacagacaggaccccatgctcgctacgcagaagggtcttgggcaaaagatgggaccaggaaacgaattctattcatcgggccattgtgcaggaatgctgccctgtagcccctaggaacagaagcccaggctgagagcctagatggctttagggtgggggttaaagtggaatgtgtcctgggccccatgacttgtcaatgttgaagtgggtttgtacatcttagcctgtcactcccacagtgggaccctaggtgcacagcctgggctctaaatcctcatgccaaactgctggcgtcatcatgggtgtgggattgatggaaacataacagcacttgggacgccgtgaaggacagggctaggagtgctgttttgtgctctcgcctttccatacacagctccagagttggggtgggccacagaggggagggagccagcagcctggccattttccctgggaaacaaactctgtcccagcagtgacactgggagagggcatgggagcaggtttctctgacaaccttatctcctttcttgtgtcaacatccatggtgtcagtgggacccaaactccccgggagatgactgtgggaggccctgtgagcttcctatcactgcaccagcatggcttgtctctgggctctggctgagtctgcagggtcattctccactcaagtgattcctctgccagatgtgtggcaaggcagggcgccctgcagacactgtgtgatgtccattaatatggaagtggctttggatttgttaattatgcttttatgtggttaataaacgtttatgcattgattgtggcttgtgccaaaggagataaagccaagagcctgttatgagctagaaaggagggaagagaagcaggaggtggtgacccgtcctattgctttctttcccccgtctgtccctcccaccaagggatcacctgctggatcgccctgtatgctgtggaggccctccccacctgccctttctcctgcaagtgtgacagccgcagcctggaggtggactgcagtggccttggcctcaccacggtgcccccagacgtgcccgcagccacccgaaccctcttgctcttgaacaataagctgagtgccctgccaagctgggctttcgccaacctctccagcctgcagcggttggacctgtccaacaacttcctggaccggctgccccgctccattttcggggacctgacgaatctgactgagcttcagctgcgcaataacagcatcaggaccctggacagggacctgctgcggcactcgccgctgctccgccacctggacctgtccatcaacggcctggcccagttgccccctggtcttttcgacgggctcctggctctgcgctccctctcgcttcgctccaaccgtctgcagaatctggaccggctgacatttgaacccctagcaaacctgcagctgctgcaggtcggggataacccctgggagtgtgactgtaacctgcgtgagttcaaacactggatggagtggttctcctaccgaggtgagcgcagccggccctgctggggcccgagggattgggacgatcacctctggccccacactttcctcctggtggctgggtgctgactcagagagcaggccaggggaaagaagggggcgaccctgcctctgtgccagctcggctagaaaagtcacaagcctcccctcacatgagccatcacccttcctgccaatgggagagaggctggtgctgctccctccacccccaccctcccctccctgctctgcatcccctcccccagccagctccccactttctcctaggactcactgaactggatctccctttcttaggttacataagggcagtaaagacacctgggctttgtatcccgccaagtttgcctgtgggcttccccagtgtggtagaaggagggagaaaaacagctcttctgaagaatacagccatctcttaaacatctccccttacatgagaggggaatagaatgaatcctcagtaaaaccaaatcttccttttggtgacagtgccaacttcctctcccaagttttattatccaaactttaagaagaagtcaaatgggttaggctttactttcttcccttcccattttctttaatatgggaaagtgctgtaatgacctatgacatgatcacatgacatgggagaggagggtgcgcaagatggtggtgaggagggccaggtctgcgtctgaatttcggctctgccacctgccagctgtgtgatcttgagaaagctggttaccctttcgctgtggcagggcctggtctgtaaagtgggaaggaaacaatatctatttcgtagggtcattatgagaattaaatgtggcaatgcacggaacgtggcttgagaggtgcccagcacaaagtgagtcctcaataaaacgtccatttatccgttcacttcctggtaataatcaaatactaagtggacttgaaacaccatttggcacgaagaagatgctcaatgaatgtttgctgggctaaggaatcaacatttaagtggtgaaaataatgccaatgctttttgttaaagtcttactactttcatttaatctccagccacaatttcaattatttccatgaaattctcctgtgttagttaattaaaaatgttttacaaactataaagtgccacaaaatgttagtcactatgatcatttcccccattttcatgagcggggaaataatgattactacttatatagtttccagtttaccaatgtcttttcatgtacatgattttaaaccttacagcagctaattgagatagaccttcttattttacagctaagaaaactaaaactcataagtaattaaataaattaaataattttcacaagatgacacagccaggattcaaccgtgggtcttcccagcagggaaatgaggctgcatccctgtcagcacccagctttgcatccccaggcagcactgatacgtgttcctgggatgtgaggtttgctgcaggccaccgaggtgtcagccgcacaggggaactaggccgggtgtcttcagaccctcctctcctgtggtcgccgggaactgaattcccagcacaaaaatgcatgccatgagaatgtgcagttttcagactttttcaatagcggagttgctttcaacattgcatttcttaaaaacaaaatcctggaatatttccatcggcatcccagggaaagattgatgcctattgtatgaggagacttgcggcagatgggctgcagagggagctgccagtgacggagtggctgcagcccgcatcttttcggcagggggtctagtgcctgcatccagatttcactggaagctgaaagagggccagaatccaactttcacttcctaggggaggtctagacagattattgtcctcaaccaccttctctctcaccccagccctgtcctgcatctgtgtctccctctgtccaagccagcctccaccatcatcatgaagacatcctggcgagcccgtgcgcccaggtacccacacctcctcatcaacaccagcctcctctccttggcctcgtgtgcctccaggattccccctccagatgcctttgtacttacagggctgtggttggggcaccgatggggccattggattgctcctaaggaggagaaggagaacattcctgcccaactcttttcctctttacgccaggaagggagctgcccattcttaggcaaccaaaaggtcttgcgtggaggggcagcggcaggggcagtgggttttgactgctgtcctttgagtgagaggtaagaaccctagaaggataagatgctgtgttgagaacggtatcctgggctcacagacaggtgatgagcaggcagattcgggggcagagagtgtggcagggacgctcagctctctaatgacagccctttcctgggaacctccccatgttagcactgccttactctgtgggtccgtttggcctgggagaggacaggccggatggaagtggctgcgtgcttctctataaaatgggaataaagacaatatccatttcacatggcttctgcgaggatgaaatggcacgatatacgtaactcactgtggacttggctcaatcaatgctgttttccctcctccgcttcctcttctatagatggtgattccaggattgactacattgctgataaaaactaccttctggggcttccgttttggggagctggggatggggagagggagtgcaagttctagatgcctggtcagcccctctttttctcttctgcatgtagggggacgcttggaccagcttgcctgcaccctgcccaaggagctgagggggaaggacatgcggatggtccccatggagatgttcaactactgctcccagctggaggacgagaatagctcagctgggctggatattcctgggccaccctgcaccaaggccagtccagagcctgctaagcccaagcccggggctgagccggagccggagcccagcacagcctgcccacagaagcagaggcaccggccggcgagcgtgaggcgagccatgggcacggtgatcattgcaggggtcgtgtgcggcgtcgtctgcatcatgatggtggtggccgctgcctatggctgcatctacgcctccctcatggccaagtaccaccgggagctcaaaaagcgccagcccctgatgggggaccccgagggcgagcacgaggaccagaagcagatctcttctgtggcctgagcgcccatccccacccggccaggtaggaagggcggggagagcacacggcattgctcagccacagctcccaccttgacccggcgctggccactgcctccccgagtccaccctcctccccgccctccagcagacaagccacaccgggttctctccctgcactttcgaggctccctgaaagccaccgtgctgggggctcctgctgatgctcctgtctgggccagtaaatctttggaacatgtgggggatctccctaagctctggccacagcaaagcaaggaggtgtgtgcaagaggaggcttccggactgggcattcccctgtcgcccttcctgccctggggtggccatagctggtgactcttcctaccttgctggtcccacctcacctgcattgaggggacggggagggagggatctgagggatgaaggtagatttctgagactctctcctaagccagaaagacgttcttaacacccctgcagtgtgaaagctggtccagctctacaactgttggtaccaatgtgcaaacacaccagccctgccatctggacccagcactcagaaacaccatacacccctggccgacgccatcatgcccctggatctgctataggccacactgaccacatgctcctggattcgctaattcactcacacacccattgcatcaccagtgcggtcacatggattgaaagaattaatacacacacacacacacacacactcacacggtcacacggagaccgaggctatgagcgctcgaacagcagagacatgctcttccccaggggtctccctgagaccacagagcctctcgcgtgctcactgcaatcttctcaagtcaacagcaggaaggaactcaaccagtaacaccaggatcctttgagatcctctaaagtgggccaaagtggtgcccctggaggagccctcctgtcaccatggtaaccctctcacacctctcctgctgggctttcccgggataccacccaggggcctggagcggctgcatgtgtgcatggcggcctcctgaggacccagccacacaccactggtgttgcctcggtcctgcccacgcatctcacagcaccaggccctgtggggcccccactgattcctccacagcctgcagcctggcaccgtgactctgtgcctctcgccctccatcttcagtactcctggcctgtgacttcagggctgggacttggtggtgctttgccattggtggcaccctctggggaaagcaggtggcaggcagagaacacggtggctcccctgaggctcattgcctgccagcttattgcagacagagcccaggagcaggagcgggtggccacgtgctgcccagaggctcccaggatggggcctctgttcccgggctttgtctgctcagtgtggctccctagagcacccagccggggccaaaccagagagtgggtggggagcctgtctgggacagagccacctgctgccaaggcagtgcaagttttccaggttacctgtccccctccctagctctgcccctcctcagagtgtgaagatggtgggtacctaggtgtcatgctcacaggctcaggaggcatcaggctcgtccctggctctgggatggaatctcgatgggggctcaggaagaggccagcaagaaccctgaagccaagggtctgagcagagggagttggcaggcctagctcctgtgccccactccgaccctccctgctcatgcggcagtgggtgggtgaggtgggctgggggcctggaggagtgcctttgaggaggtcagtcctggcaggtggacagaggacgcctggcatgggctgcttactgggaccccaggcggccctggccatggccacagtcttccttcttttggcgtgtgggctggtaccagatctggggattttctaaagggactggggggaggggagggcattgtcaatggtggtatctttagcctgagacagaagatttttaaaggcaaaattatatttctggtttgttgtttcagaagaccaataaagactgtattttcctatgtacttcctggtttcattgggtgggaaggggacctgggtgccaggagagttgcttcctgccccccacctccccaggaggctggacaaagcaccggtggccatgatcctgatgcgtagagctctgatgacagacggtgcctcccacccagggccagggctggggcaccgctgggagagggcggaggccgagtcctggatcagagccaggccctgtggctgggggcagtgagctcatggcctggcagatccaggatggtacatccaccctggcctgacaggcaggttcctgagcctcagggcagcttctctgggcgacaccgaggttgtggtgcgaaggtgagctggggagcccgccatggcccgtgccctgtgggtgctgctcatccacccaagcttgacatgaatcggccctggcagccaggacagatgggctcgtgtggcgagaaggcactgtttgcccagaggatgctgccgcacggtgggaggggagggcagttggaggggcctcggctgactgggttctttcagcctcactggatgctggcggggctgctggccaggaggaggagcctgttcagggcttactcaggcgacggcaaaccatgctctgggcctgcagggtgaagcctccacggggctcagcaggtgggccccggaattacggactggagggctggggagtgaggcactgagtagaggggatgaggaagagcatgagactctggggttataagcatgctgcaagccccactgaagagcgagctcaacgcccggcccgagaaccccctcctcagctatatggttcattagtcttcagaggccaaggcggaattttctccttcctaggatcttcctttggataacaacccagcgagccaggagcaaaccctagagggaagtgaaccatcagggtcccccgggagttcagctccattccatggcagagctggggtgtccgccttccccaggtggtgataagtgtagggatgttgctctcctatagccctaataattatagcagggcccaagacaagtcttcccgagccccactgcagaagcaagaacggggcccctctcaggcctggcacaggtctctgtcatgcttatgtgtgtaattcaaatgtcatggttcccagatagaagccctcaaaggtctgaaggctgggcctgtactgaggctgacctctcaggaggggagaactcttgcagccctggccggcaggaagggcctctgtgcaggggcttgtgtacattacaagtcatgctggaagaatgcccgtctgctggacaatcacttgcccgttacagccccatcctggagcttgacctcattcctcgcctagggcctggaggacatggagaattgaaaacagatcctgatccaaaagttagatctctggaaattttgcagtagctgtctataaaccacctgcttagggatgaacgcgatctctactggtccgctgccctctgtgtgagccggtggtgttatacacggcagtgacgcgcagcccgccactgcccccgtggctgggctgagtgcccgtctcctaccttcccctcgagctcggtgcgcaatcgtcaccatacagcccccaccacagacaccacactcagcaggcctggcgctcacacgcttacagtgccagccgtttccagggacagcaaatgaaccacctacccctccttcagctacaggctccagctggccccaggatcagggaggctgagccacaggccagggagaggaagtggcagaaggagaccaaaagaaaaatcataattgaagtatcaggtctccagcaccccattcttttcctctgacattcatgcaccccagagtgtaagagcgattgtctgcagtgagttaaactggaggcactgggacactgtttctatggcaacccctctcggctctaattcagctctgagttaaaaatgctatcaaataattggagagtgcaggaaagcacagccagcagcctgaccccctgtcccatccttcctagaccttcaggtgtacaggagctgagaaggcccccatcacgtgggagcagcacaggcgcaggcttggctgggagcacagaacagtctgtagggagacgatttcggagtcaaagtttggcctggaaattgggtctgggtttagtgtgccctgggcccagggaagcacggcagccaggcgggcacaaatcccttccaagtgctgcaggtggctgcatcgcacacgaccagtgacaccgggcttctacccgggcaatttggcaatgtcagacggagccattctccccccgtcgcttatcccagagtggcacacagcccaggaccccaactcaggatggccctggtgccctctctgaggcaggaagacagagcccagccggctcctttgcattccctttgccctgaccctgtctgctccgtccccatcctgctgcgagagtcctcacctggccagggcctcggttacaaggcaggtgcctgccagctgcgttcacggagccaggatggctgagctcgaatgcctgttggatcgcgcaacttttcagaacacagctgggtcccaggtactgaagctaaaacaagggtaaggagcgcttcatcgcagggacctgatcgttctcagacagctaggcagagacaccaaggactctgcaggcacgaagaaactgaaagtcaggagaagcttgtgagggtcacagttgctctcatcatgtaagccatggcaaaccgcagcacagggcagtgaacctgggttccaacgagaggcggtctgcgttcaaatcccagcctcattcattattagctgtggggctttgggcaagtaagttttctgtgtctcagtcccctcagctgtaaagtagagccagaaccatcgccttcactgggtcaccccaaggaccacatgggaggcagtccacagtgcccggcacacgctgaacacacacactgagctcatgcctcaggggttcgagtcacagtcccacttccctcttatacgagaccccaaggcaataggagacggagcaggtaagggaatggcacaggaatcagcatccactgtttgctctataaagaggcagggcatcttggtggttagtaacaccttttgggggaaaagacaggtctggactgaattatggcatccgatccccgctagttgggttgctttgagccaaacgttctgagcctatggtcctcatttataaaataggcactgacagtaatacctacactctaaaatatttgtaaaggttaaatcagttaatactgcaaaagagctttcgcaagctttaatgtttaggcaaatcagtaggcatctcagtaaagcgcactctggttgaacaggtatgggctggaacctgagactatgtgtttctaacagaggcccacgcaatttcagcgctgctggtcttcaggtcatcttttcaacagcaaagttttcaagaagttaccacactgtaaatactcggtaaatattagctttatgatgatgacgatgattgataaaagacctagaataaaagagctctgcccgccagcctttctttcagctacagaatgcctcagtaatgctctattaacccgccagccttcctttcagctacagaatgcctcagtaatgctctattaacccgcaggaagtgtttctcaagagaagcttgcatacggtaaatatattatgtggaagaggggggtgggtggggggcggcggggggctgggctgcagtctctgttccgtgtggccgtgcagatctcctagcctctctgggcttcattttgctcacttcgtgaatactttcacatccaaagttttatggttttacaaatgaaatggcttaggaagagtgcacttccacccatcccacattccaccggcaggactgtggccctggccacatgtgcagggccttctgctgtgatctatgccttgctctttacactgtccccagcttcctggcctcaacaccacaagggccgttcctacctgcagcaatggctgtcctcttgtccacggtcaccgccacagctgtgcttgccgtcaccaccatgggttcacccgcactttctggggaaacagagacaacccagtcatggggaagagctgtggttggggcaggtggagcgctaccactttcttggaataggagatgggaataaaagcaggcgaaggcatccttggaagaattgaggcgagggtggggacaggggttgtgtttggagaagttgctgctgtgatggtgaccccaacacgggtcttggacagacacacacatggcctctggccgccagcacagtgcagggctgcagtggccccacgacactggggtttctgcgtgtttgtcggctgcggcatgcattttgcccacaacacctgtgttgtatccagtgatcccttccaacggcaggaaggacaggctgcatttcagcactgggtggtgggtgatcctggattgctctctgtgagtctgcgtgagtcagggaggacgccgacagtcagtcccaatcaggaagccagatgccacagccgagccaccatgcggccctgggcagcgagatgacggaccctccactgcacaaccgctctccgggtctttcacttgcttctcagctgttgctccacttctgggactctgcagcaactcagggcaagtcctgaggctcctgaaggccacagggcttgcctcgcattgctctctccacttcttctggaacaatcaggccaccataggtgcacagtttagagggcagtttcagctccacattgaaacagagctttctggttctgactggggctggctacttcggggcctcaggcttcttaattctcatcagtccttggccccggacttgaatttcaaagcactcttgtctgcaggtcaaatgcagactcaacttctgagaaaggggcaaacagtttctgatgtgctatcacattttgttagaatgtcttgatgtcaaatgttgcctgaagcaaacaggtcatgggactcttgtgtggcgattatgacaacagtgtcaattgtcccgggacttaaccaccagcttctcacatctgccacgtcaccaagattacccatcacacccgctgtcgtcaaatatctcaagaaacctaaaactgcagtctgattccaggaacttccaatatgtaaggttgtccttgattctagaaatttgccccatgatgacgaagggacaattccccaccttgtgtctacagacatctcgaaggtggtgatgtggcagccccgacaatattccctgggtcccacagcccattttctgggacagaccttccgtcgcatttgtaccccagccagcagaggcttgtaggaaacgcagatgtgagcatgtggagaccctaatgaggcagtctctggggacatcagggatttcagtgcctggctcaccgtggctacctggcccagcacctggtgggaatgatcagggcgtggagtgcagaagggggcggggcccagggagaggtgggctgtgggcatatttctgaggctctgctgtgtgcggacaggtttctaggcactgactgcacaatgcagctccacgtggtcgggacttagcccaccaggccccggcaaagggcaaccatgtcagcctagagagacaggcgagcttcccctcaccctggaggcagctcgtcctcttttcccccttgaaacgcggttgttttccttcttttggggtggaagggagtgtgcagaggtggccatgtgtctaagcgtgtgtgtgcgctgagcgagtgagtgggctgtggagaggaagtgggccccgcctccctcctcaccaggccccctttttgggctccagcttccctcttttctcctcgtggctcagcttctcacccacccaccctcccacctcatcaccacataaagctcccccagcagccagcaggctcagtcctggtgaatgcgggcaggaggggacctgtcatcagggcctggggcaggggctggggcctcattatagaacctctccaggggcctgtgggtgccctccctggggagcccaatgtgctgctatcgagggtgtggccacagaggaggagctgcctctttcagccttggggtggacggtgtgggaaggggtctcccctttgcttccagagccttcctgctgggcttgcactggtaataaaaactccccctccctctttccttacattcagtgtggtaacggggcctgggcttggattagggcagagcttggctctgtggctcccttgctgtgtgaccccgggcaagttacagaacctctctgagcctcacgttctccttgtgtaagttgagggataatgacggcacttatctcatggggttgtctagattaaatgaaaaacacgtggaaaattgttttgtgaagcatagtagttatttgcacgtgtgtggagggaacagcacaggtgggagtaggggcatagcaccaggtgaggaaggcgggattccggagggggcggggtggagctcctccctgctgtttgccttccctgtcctggtcccaggaggatccccgggatcctgggcctccccagccatcagctccaggacatttttccatcacgacgcttgaggatggtttggcaaagtggtggtggaaggcctttggcagaagggcgtcctaaaggggaagttctgagtgaccccagccctgactttccttttagaagtctccacactcctgcatcccctcctggggctcaccccacctgcctgtgcacactctccaggcccctggatccatgtgctggaatgggatcagccgccccagcactcacctggtggaggggtggtggaggggtggctgtgccatgcactctgggatccctggacaagccccggaagctccctgggccacagtcacttcgagtgtaaatcaagagcaccaggctatgcagacactgaagcctctgcaggatttttccggtgctctgttagagtcacttaatttttcttattttggttattttccagaatgggggctggggctggctggcagttgggtgcccatcaactctgagagtcttcctggtccctggccgtgcagggattttgtggttgcctcataccccaccctccccaccacctgcctggcacagcctctctcttgagctgagaggggcttgtggagaaggctgggagctccctgaggctggtcctgggtggtcctgggtaactggggacgggttgctttctttctgtttgggaagagcagggcagccccactgacttagtgagtactgcagcccctaatgaaaccacccgtctgggtggtttatgaagctttcacagacatgcaggataaatagaagaatcttagagatggactcttctgatctcatatttggaattggggctagaatcccatgctgggtttttaaactccaactttgatggctggctagggaatcaaatgatcaggctcaccttcagcgtgggacctgtggtgtgggaaggtgccaatgagcttttttaagtcactaatgcatgcaggagggaaggcaggaggggaaccctggtggtctggacattctattccatatctcgttcccatttcccactaagagcacagcaggaggagagatgagactggcctgagactggcccagccccgggagcaccgggctgtgtgttacctggtccttctgcccagcggaggttgaagacgaagctgccagcaggatgctctgaggcctggcggtaccacagcgggaagcggtccagggtgaacacgctggcctcgtcctcaggtgtcaggaacttcctgcaaggaggaagatgtggtacctctccccagatctgtgaacacagtcatcactctttccttttctcacacaaggtcaacttggctgggctaagagagtgattttagcccctaaattagtacggccccagacaatgcttcccagcaattctcgccttttccagaaacaaaacgatgtcatgttgcatctagctagcagctggaagaggcatagggtctgtagagtgaggggatactttccatttttatgtaaactcttttgcctgcagggattctttcttttggatagagcccaatttcttcttgtctggctcgttggcacgtctgagggaggaagctgtagtcagctctatcactgcactaataggagggcatcaatccccccaaatggttccttcaacaggattgcctctaggtttttgcatacattatgagtttcctttttttgagcagctttaccttgctaattatggttttgcattccctgaacacacggcagcccacagaagggagtgttcggccagaagcagagtgggaggcagggagaagcagggtgggggtggggagcagacattgctgtggataatccacaaggtggataactgagatttggttttgagagtgacgggctcacatgtaccagaagcaacctgccttgtgacacagttcctgggctgccattcacctcgagtctgggtgaagggagcccctgggagtgctcgcaggaggcagaggcactgggaaggtctgtctgcctcgaatctcctgcttccagtcttagaagcctctgagagggggcgagggaagggtcagggaggcagtggtgctctgccttctccacctccgcagggatgggtgggggggaggaggggagggaggagggagggaaagggaagagcaacttaatttgttttcctagaaagcctcagctttgcttagcaagtgtggatttgtcacagagtcctggaagaagctcaaagatggcgctccgtggctgggcgtgcttagcgagaggagcagctggcgggtgggaggcgaggagagtagggtcaggtcggctcaggggccctgggctgctctccaggtgcctgaaggtcctcacctgttggagtctcctgggttgcgaagcggcaggtggcaccgctcggcccctaacccctcctctgggctcccatcctcccttgagcacccgggtgggccagcccctgattcccccagaacccagccttggcttagagcagggtttctcagccttggcaccggtgacattttgtgccaggcgattgctgtgagggctgccctgtgcatcatgggatgtttagcagcgtcctggcctccacccactaggtgccagtaggaagttctctgcctcccacagtgtgacaaccaaaagtatctccagacatcgctgaatgtcacaaaatcacccccagttgaacattcctggtgtggaggcctaagtcttccatggcctacagggagctgggcctggactcctaccaggtagagtaagagaccgcaaatctcccacaccaaggtgggagtgggtggctcaagaaggcactgcggggtgagcactccatctaccacagggccccagcagcacctcctctccccttaggagtggggaaaagagacacagccagaagattcagcctgtcacacagagaccagcccagagaggaaagcaatttcggctttgtcccttagagattcctctaggtggattctccgaccaaccctcaacttcaaagtctctccctgactggtccggcctccatcctgttctagggacccaccaccaggatgtgtaagccttcggggaagggttgcctttcccactgtcccaatctgtcaatcccgatccgtaagccttcggggaagggctgcctttcccactgccccaatctgtcaatcccgatccttctgccctgctgggctcccaggggtccagcatgctggagacccggtgccagtccacccatggcccaggaacacaccatgggactctggccctctctgccctgcagggattgccctcccgaggtggccggcccaacccacctgtcggagaccttctcggagcccacgaacaagctgcttctcaggaggccagcccgggtgcccaggaaggccatgtccaccacgtgttcagactccctgtgtggcagacagagcgggaatggtcaccacatggctgtggcaagagcttgggggcgacctgcaggggtttgggggcctctccttgctcctgcctggcctggctcagggaagactttccaggaaggctgggttcctgggaaggggccgggacacgcaccctgctggcatccacggtgcccatcaggtttcaggcccggcttccgggcagcacccctgtgaagtgaagccctgggcctctgcctctctgcctcggcagatctagctcttaatttgttctcctggcttttggggagttcgatctagaagatggaacttggaagggagattctgtcctgggacctaaggaacaggaacttctcatgcccagcacgtaccaggcacctcctggtcttacagccctcctcatacttcccttcttaccgaaacgtgaagggagggggagcaggcactgcatacacccacccaggagaagtcccaacggacctcataaccttgccgttgagacttgaaagaagacagatccatgagctagttggcgtcacatatctccctcccagtctcaaagccacaatactttgaccagggtgggaagtcatctcttttgacccagatgatattcttgtctttggcacagtggataggaggctattacctagttcctctccatgcccaagggtgtgtgctatagtgagcatacaaagtaggcaattccaaagcactgccaggctcagaggctggactgcgggggtcttcctcatggatagacctgtgtctgtgggtggtacccgggactgtagtaaggtctggaaaatcactgagggaaagggtctcccccacctactccagtcctgtagccagggggcttgtacagggtgggcatgggagtcataggactcgagctgcacagagccctgccccagacctctgagtcagactctctggggacagggcctaagctcccctaaagcttcctgattcaattctctgtgtaaaagcagagagaatgggctaatgggtctcactacccataatttggcttcaacaatcaccaacccggggctggtctcaattcagccactgcctcctccagcccctcaactagattattttgaagcaaatcccagatatttcatgggtaaatattttaatttatacaatcaaaatagaaataacatttaaaaaaacttcgatgccattattacaccttaaaaaaacctgacaattcattaatatgatcagataatccagtcgcctcgcgaatttttttaagtttggctgaatcagaatctgcctaaggctcacgcatggcaacgggtatctcttatttgtctgtctgtctctctctgtctttattgagatatcgttcaaataccatccaattcacccacctaaagtgtgtgattcaatagtttttcatgtattcacagagttgtgccaccgtcagcactgtgaattttagaacattttcatcaccccggaaagaaaccccataaccattagcagtcatctttggcctcctttaacctgattccctttctctctccactctccctctccccttctcttttccttgcaatcgatgtgtggaacaaacagagcgacaaagggcgcttgcctgtggggattctccggttctggccttggcggattgccaccctggggtgctcttcagcctgctctgtgtcccctgcattgcctgtcaactggccgtgagacctcagggcctgaccgggttccggtttgtgtttttacaaggctgttcttcacaagaggcacacactctgactgattagggcatgaaaaatacatgcattcttttatttcttattttatttttacccgaaatatctgtataaggaaaaacttctcctcatcaatatttagttatcctgaagtacaacttttatagaagaggcaggataaataatttattctttttgtttctttgttaggttttagaataatgagttgctttcctaacaatcttccaaagatggccaatgaggttttttccagtatcattatgaacccaagtattttaatatatttcatatgttttaacccattgcaattattattattattattatttttatttaaagacaggttctcactacgttgcccaggctggccttgaactcctgggctcaaacgatcctctcgcctgagcctgccatgaggctgggataacagccgtgcctccacagccagctcctgctgtgattataattacttttgctgctctgatcatccacctttggccagtgagggcctcctccagctggctctggggtcccttgggcacaatatcatttgtctttggtaacttcttgcttcctcatacgacaagatgttccaggttcattgtgcgtatttcctgcccctgtcctggaatcagacatttcttctaggatcatgggctcattttaaagaggactgacattgaaagtccgaagtctggggctggggcacttgctgcggtgggccctttcaggggagagagctaggatatccttttaatttctttaagagaaatacatcatgagttcaaattgatatttctaattcaaatttagcattccatctaatcttaacttctctgatttttgaaatttgcatatctcttttcccttttgctgaagatcttggttcttaatgacattaatataatacaatttgctctctctattcagaataacaatgccaatactatttctagcaatgtgattactgaggactgcttaacattttatttatttagtgtttacaattctaaagccccttgaaagaattcccgtatgttcgattatttaatgaacttgatatatggctaggtttagctgtttcatttgctttcaattactacaggttactttttaaaatttaattttgttttatgattagataaagcatttatatggttccaaagtcaatatggagaataaggcctattcaggggagtctgtctctgtatccatctccttgttccttcactcttcctgtaggtaacctgacttttggttccttgttccactaaaaagtacgtgtgtgtatgtgtacatacatatacgcatgtacatttatatgtacctttgtgaaagtaattatgaaaatatatttgtattttctctttctagataagcagtggagatattattcatacttttttcattactgaagatgatttcatagtggcagtatatagagatattctaatttttcacagctgcatagaattccattatgtggatccaccatgatttatgtaactaggctcccactgatgaacgtttgggttgtttccaatcttctattgttattaaaggtgctataatgagcagctcataggtacatttttttcatatttttgccagtgtatctttgggataaggttcctagaagtgaggttgctgggtcaaagtgtaaatgtacatgaaattgtgctagacgtcatcaaattcccctcgacggggtttgaaacatttcgtatcccacccacaatctacgagtgcctgactccccacagttctgccaacagtgcacactgacaagctcaggtggctttcagtctgagaggcgagaagtccaatctgggcatagttgtcatttgcatttcagattacatgttaggttgagcattgtttttctttatattttaagactatttgaattgttcttctaaggactatttgcatttttcctctgaactgttcgtatttcttgactactttccctctaaggtagttgacctcttaagtctcaattttcaaagtcctttgtcgtgaatacataatatatagagtaaccctttatctgttttataagttgcaaacacctttccagtttgtaatttctctttttaccttgctcatgtttttatttctgccatagaaacatatttttttcttttttttaaaaaaagatgaggttggccaggcgcggtggctcacgcctgtaatcccagcactttgggaggccgaggcagggggatcatgaggtcaggagattgagaccatcctggctaacatggtgaaaccccgtctctactaaaaatacaaaaaaatacaaagaattcaccaggcgtggtggcaggtgcctgtagtcccagctactcaggaggctgaggcaggagaatggcgagcttgtgccactgcactccagcctgggcgacagagcgagactccgtctcaaaaaaaaaaaaaaaaaaatagatgaggtcttgctctgttgcccaggcaggagtgtggtgacatgaccatgcctcattgcagcctccacctcctgggctcaagtgatcctccctgagcagctgagtagctgggactgcaggtgtgcaccaccacatctggctaagttattattatttttattttagagacggggtcttgtcatttttcacaggctggtcttgaactttcaggctaaagtgatcctcccacctgagcctcctgagtggctgggactacaggcacgagccactacacccgaccacagaaacatttttaatgttgttaaatttatccgtcattcctttattgcttctgaattttgagtcattgttgggaaaggtttccccactcctagattttagagcaattggctcatgttttcctttagtatttatatggcttcattttttacatttgaatctctgagtcatttggacttcgtccaggtgtatggtgtgagaaaagaacataattttatcattctccatatggctctcaaaccggttatttaaaaatccatctttccttcattgatttgacaggatgcctctgtcatagactaaattttcacatgcatttagatgagtttccggatttccttttgggttcctgtggtctgcctgccttttcttgtgccaataccatactttataaacctcagaggctttgtcatgtgttttaatatcttggtaggcccaacctcccttctttgctttttttggtgtgtgtttgtgtgtgtgtgtgtgtgtgtgtgtgcgttttttttttttttttccagagatttcctggttattcttgcttgttcttccaaatgaacttgataatcagtttatctagatgcagaaaaagactgacggtgttttcattggggttaacattaacttagggaggattaatatctttatgatgttgaagtctcgtatccaaaaacactgtctttccatgtgttccagcctctacttttgtgttttcaggagtgtttcataattttccttatataggtttttgaacagttcttatagtttatgtcgtatgttcttgtagtcttataactttatcatgtattatttcttgccttttaaaataagccttctcatatcttctatcttttttgtgtgtagataaaggctattaatttttgaatgttgatattataacctgctattttactaaattctctcattgggtatagtaattttcttattaattcttctggggtttccagatatataattatgtcatctttaaacagcgacaattttacttctttctttccaattctaattgcctctgcttgctttctcttgtctaattccttctggccttgttaaatagcaatggggaagtaggcatgcttgtcttgttcctgtctttagtgagagagcctctagccccattaagatgttactttcatgcttaggtcaattttaattctactgagtggctttaatgaacaagaatggtatggctgggcatggcagctcatgcctgtaatcccatcactttgggaggctgaggtgggagggttgtttgaggccaggagttcaagaccagcctgagcaacatagagagacccccatctctacaaaatttttttaaatgaatgaatattaatatttatttaatgccttttctatatctttggagatggttatgtatttttttctccttaactgtatgctattttatattaacttcctaggaagtcttttctgaagcatgctctggttaagaatatttccttctcaatatttctccacattaaaaatcatcactgactaatctctgaggttggaaagatgaagatggtgcccctctccaaacctatttgctccagccctctgtagaaggcacaacagtgcagggtttaagagtcggggcgcaggagtgaggctgcctgctgttgattccagctctgccactttcgaggcgtatgacctcaggcgagttgcttgatctcgctatgctttgttttcctcatctgtcaaatggcagtaatgagagctcctgtgtgggtgaggactgcggtgaggatcaaatgggttatatacactaagcactcagaacagtgcctggcccactagattgtttttctttctttattctaattttgtataggtcatatattcatatggttcaaaattacaccaacatgttagggtgaaaagtgtcccttccatccctgtttcagttacccattttccaaccagaaacagctaatgaggaatgtttcctgagtagccttgcgtagacagtatacagatcatagatgttatctatataatccacacaaatactatggcacccactttttacagaaaaggtagcgtactatactatgtagaatggtagcattccacatcttgcttttttcaataggagactgtccctataaaattctgtaggtgttttttattaggatagcactaaaaaactaatttttaattttctagtatctaattatgtgcttaaatttattgactgtgtagaggaggtttgacatcttcacaatgttgaatcttcctattcaggagcaaggtatgacccactgcaaccttaacctcattaataccttactctgccccccaacactcatgggcacacacatgccctacactcacactcacatgccactcatcttctttctaccaggccactaaacacaatagtatcaggagaagaccagcaaagggagcgaggatttctaaggggctgggaaaaccgaggtcaagttcattggtgccatgaccttacctgctggaaacctatttgaactgctctttggccaggggcattttggccattgaagtctcatggctggagtccaacccagagaaaggagctgtcggaatgggactatcctggggtggggatttagtccagtgcccagggggacctccacttaatcttaggccaaaggacgtgggttctctcctgagccaccagccagatggtgagaggggtcccaacttagccaagggaattctgggggctggttggggcctgggaacctgggaacctggacctactcggacatgttgagggccagcgctgtccagtaggcttccatgggggctgtcaccaccgcgtcaaacagcacctcccggaccagctcctcgtcacctgggtgcaaaacatcagggaaccaggccacatgcttcctccatgctcatgaacacaactctcccatcctaagttcagggagaagatgtgcttcctgaacgtgtctatgggacatgtaaaactatctctgtgagcttgagggagctgcctcacctctgtctgtcttcactttctcaactccaaaaaatatgtcagtacaacagcttgatatctgaggctctttccaattgtaacatctgatgaacttaggagaccctcagtgacctcaggttggatcttcccagtctcccccatctcaactcttcctcatctgcttcttaaccatccagacaccttggcctttggtcagttctgtgaattttttgttgttgttgttgttgagatggagtctcattctgttgcccaggctggagtacagtggcatgatcttggctcacttcaacctccgcctcccaggtttaagcaattctcctgcctcagcctcccaagtagctgggaccacaggtgcacaccaccacacctggctaatttttgtaatttttgtagagacaaggtttcactatgttggccaggctgatctagaactcctgacctcaagtgatctgcccaccttggcctcctaaagtgctggcattataggcatgagccactgcccctggccagttctgtgaatttgaccttgccaagctcctccttacctcagagcccctatacatgctgtttcccttgatctggatattctttttcccagtctttgcatggaggctctttctttttcttctctcatttaaaaaatttatttatctttattgaggtaaaattcacataaaatgaaactgaccaatttaaagtatgcaattcagtcagcggcatttagtacattcacaatgttgtacaaccaccacctctatttagttccaaaatatttttatcaccccccaaaggagatcctcctcaccttggtgaggaggtgtcacaatagagccacccaagtggcttaacaggatctcctttaaagcaggcctatttctctcccctacagcatcctgttcatggcgcttatcacaatttataacaacctatatctatatatgtaggcttatttgcttatcacctggcttctccactagaatgtaagctccatgatagcaagggccttgtctgggttatctctgtagctctaatacctaccccagggcctgacacagggtgcaagctcagtacagatttgttgatgaaatgaataaataagtaagtaagtgccctgttgggttggcatgggaggcagtcttcttatgcgggtgacaattatgtgacaggatgacctgctctttcttccaaagaggaagaaggaggagcaagctgaggatgtggcctaatgagctcaccactcgcattagtgcaggtgagaaggccatgtgaccatggagcagagactgaagtgtcacagctgcaagacaaggagcacctggggctcctagacctggaagaggtgagcaaggttagcctgaggaactggtttagaaaacagagcccacaggcttcgagtcatctggccaaatgctccccttgtggagatgaggacttctggtgaagagtggcagccatttgcccagaggtccacttctagacagtggtagggaaaaagatgacagactctgaatggtgctttctcctgacccttaacagagcttggtggatagaggctgaaaaagatcccagtccctgacctggggatccatacatgttaccacagttccaagggtgcttaaataccagctcagccctgtggtaaggctggctatgcctttttctttgggaatctccctgtttgatctaagccatccatgtgctaatgggatagggctgtgcagcagcctccccctgccttcccacctctcctggcaaagtcctgaacttcagggccccagaggaaaagcttgcctcagtgggcggccagcactcacactccaggtctgggtccttcctggtgaggaagcggatcatggcctctagctggctgagcttccggtggtctgggtcaatatctgtgatgcagtagatcctgaaacccaggaaagtcagtgttatctcaaaacattccacctgtctccctcccattttttactcctcacttaccagtcaccggccagggccaggtctgggtgaagcaagtcatgcaggcctgaaaccagagtccacattcagggtgatgctccctcactgccatgagggtgtgtgtctcaattgtagaaacagccacccagtgagtttctaaagaaagggactggggtctgttctttcttgctcttagctcacagtaggagaacatggctaagtctgcacaggtcccacctcctgaaatgctttcttctcattgtttcatgtccaaatcctaccccttcttcaaggttcagggcaaatgccatgccttcaatgagctgcccagccagtgggagcatcttttcctcctgcagccctcatgcccctcctccccatccaggttggatttgggttattatgggcatgtaataaccttgtgcttctgccagacagcagctccctgaggaagctgcatcttattcctcctagcatctccctcaaagggaggtgatactttgaaaccagtgattttggcttcattggcttcatccccaggatgggccctgtgtgttttgcggcctctcacctaacacagagccagcctgatctcatgctcagtacacgctgttgactgaaagaacgatgagctgatgctccatggcacctactcagagctaagaaatgaacaggtgctccactgagggtaagtccaaggaggggatgacagaaaggccagtggggcatctgtggagcctcacaagggctgctgctctgatgtagacacagggcaagcagctggaaggggagctcccttgcccacagaagaccaggagactccgggattccaagcccctgaccactggaatgtctcactcccaggagtgggtataagacagcaccctctgtctcctggaggagtgcaccctgggaatatctgggcagaggaagaaatgtgtaggaagaaggaagaaggcacgatggaggcctagggatgatggggaacagaggagagtgccccagtgctaggatctgtgctgtggaagggcagacacagcttccaggtgagcacacagctagtgcctgactcagtccaggtgcgggagaggggatctaccaggggcagctcccagacagatgacagctaagctggggcctgagagtgggtcaaagtgtgctgggagaggagggcactccagggcagagcaaagcagccaggaggagcaggcccatcagcagtgatgtgggcagacttggcatttctaggaagatccctctggctgaagctcagagaagaaaggagtcagggagaacagctggaagctactgtggttgtccacaagagaggtgacaatgaccaggatggttgtaggaaggcagggtgatgagatgtactcagcagatagcagagggtagtatgtgggtgttaaacagaaagtggccacctcttccaggggttcctgggatatctgtgacccctgagataggttgtggtctcctaaggtgattgggccacagtaagtcaccggcaggagggatggggttggatggggctcttctctccccgcctccaccactgttctctgccatctcactttggttcgcatcccataagctccaggtatgggctgaattgtgtccctcaaaagatatgttgaagtcctgacctgtgaatgtgaccttctttggaaatagggtcttggcagaagtaatcaaattaagatgagatcattaggataggccctgatcccatatgagtggtgtccttataagaagaggtaatggagacagtgagaggcagctgaggggagaaggccacgggatcagggagcagagactgaagtgtgcagctgcaagacgaggagcacctgaggctcctagacctggaagaggtgagcgaggactcccctggaggctttgtggggagcacggcctttccaacacctgacttgggacttccagcctccagaaccgtgagagaatacatgtctgcggttttaggatgccatgtttgcggtactttgtgctgggagccttagcaaatgaatacaggcttccctcctctttctggcctcctttctcatcacctttgcagtcacctggcagggaaatttcagctttgagctttgtttaaaaaacatactgccttgacggtccttctagtccagcaaggcctcccggaaactagcagtgcggttggcaggtctcaggctctgctggtttgacgacagacccacagatcctgcatgccctgggagccagggacacacacgcccctctccacctggcagcattgttctgagaggctgctctggagcctgggagctgggaggctgtcacactggctctggttggggttggccctgcccagtgtcccatgagagcccattattttctgcttaactgtccctcagcccctggtaccgacccaccttcttccacagacgtgttccccagaaggatgtattctccgtggccccgggacagcaccacccccaaactgtggggagagaagagaaggcactcattcagcagcagcagatgccggcctgtctcccgggcctcgtccttgcccttaccaacactaggtgtatgggctttttgtacccacgacgagtggtgtgctcctcatgcccccttctttacctctggcctcacagccatcccctccagaacggaggcggtgcttccaatttcccagaagccttccttcctaagcaggaccctggccattctgtagaccaagagccctctcagctcccattttcatcaagggacaccctgaaactcacaggcatcccctaaaatgtagaacagtctctctgtttcacagggggtcccacaaacaggagctccttttcctacccggtgagtcctgctgtgccttcctctccttggctgaacatcagttttgagccttggctgaatatctgactttcttggggaactttaaaagatgcaagtgcatgggctctacccccagaaattgtgattaaattggtctggccagcctgggcaacacagcgagaccccagctctaaaattttttttttaatcaaaaaattaatggggtgtggtggcacgctcctgtactgtcccaggtactcgggaggctgaggtgggaggatcgcttgagcccgggaggtggaggctgtagtaagctgtttgtgccacggcacttcagcctaggagacggggtgagatcctgtctcaaaaaaaactggttttggatgaagcctgggcagtggcaacttcacataattcctcaggtattccaatgagcagtcagggctgggaaccagggctttacggagaaatcagataattcagaggtaacgaccacttgttttctaatctgcctaatacctagagccaaatatttctacagttgcacggaacctgagatcttccaatttgctcttctcactgctttaggatcttaactggatgatatcacttaatcttcacaacatcaccaaaaagcagcagttattgtcacccccattttacagatcgaaatctaaggcacagagaagttaagtgaaactcaaagacctgttaacagagttgtaggaggcagaggtgacgcatcagtaaagcagggagtgctggacctcagagcctcttctcagagacagggctaaccgccctcggggaaatgacctgttaaggcagcttggctgctggacgctgatgagcagtgaaataacaacagcatctgaaggggcggggcttgcctggggcccacaggagcatagcacaggacatacacttgaccaagtttacacagcctgtaaatggtagagctggggttcacgtccaggcagtttggctctggaacctgcattctaggctacactggcaaagcaggtctacacctcaagtttcctggatgctgacctgggtcttttgctattaccacaaaattgccaactaaatatgagttgctggtattcatgttcaaccctcaccccgtgcaaataaagcctgtgtccctcacctgaaaggggtgtcgctgatgtccgtgaagaagtagtcattggtcaggaaaagaactcgcttctgaaagagtagacaaggaaagagtgctcacgcagagaagagcggcccccagcccccacctcgcccccagggctcttggggtcttcatcgtcactgtacagtccctccgccttcttgtctcctccctgaccagcccctacacacctcatcctagtgacacccataggcagatcctctctaggtgcagcaaactgcagccctttggggcgtggcctggatttcaggatcaaggtctggacctgcactgcccatcacgatagcccctaagcagcactgagcacttgaaatgtgtggccaaggaactgaattttcagattttagttggcataaatttaaacttagttagcacatgtggctagcggctatattgggcagtgctgatgtagaccatgactctatggttcctagagggttgaggttggggctgtcagtgtgtgctaagaacttctggagcccatgtatacatacacaatccacttaaacctcctcgccctcaaagacacccagggagaaggggtgcaccattctccctccactgtcatccatgcccgggccacgggaccctttcacaacttccttttcctttctaagctgccatcttttagccttggtttactttgtataaactagggcatcatgtagtacaaaagtggctaagggcatggctgggcttagatgaaccaggattgaagcccagctcagccactttcgacctgtgtgctcttgagcaagttacttcacttcgagttctcatttgtaaatcaggattgtccacggcctctcttgcacgaggctgccgtgagggtgcattcggggtgctgaggttctgtggattgtcctgtccaccacacaagttcatgtcattgggaaagccacattttgcagttggcccaggacttgttcttattccctttacttctttctgactttccttctttgattttggaaactggagcgaggtgtcagaagggacacagagagagaggacggcaacaaaagccttgctttctctaggaaactggctttatgccaaatcagaatgcacctttcacaaaactggacccatcccctggtcatgccctctggctcctctgcccagtcagaccctctctgtagcttctctctattgcagcggtcgtgggatgtcctggaagatgtcttgggggagttgggtgccctgtgctccaaggagcagctggctggagtgtcagaactggagatcatttttttatttttactctttttttttttttgagatggagtctccctcttgtcacctaggctggagtgcaatggcgtgatcttgactcattgcaacctccgcctcctgggttcaagcaattctcccacctcagcccccagagtagctgggattacaggcacacgccaccacacccagttaatttttgtattattagtagagacggggtttcaccatgttggccaggatgatctcaaactcctgacctcaggtgatccacctgcctcggcctcccaaagtggtgggattacaggcgtgagccaccatgctcggcctatctttttttttaattgaaggaaagggtggatgcacagatcttccatgtattacctaattagcttcgatacatgtatccagccctgtgattaccaacctgtcaaggtacagaacagcctctccagtctctctgcctaccccttctggtccatcccatcccactccttcacaggcaaactctgttctggattctgtcaccatagattggttttgcctgttcttatagtatgacacacacaaaaactgcgtctggcttcttttgttcaaaataatgttttcagcgtccgtctatattgctgtccgtccagtagtttgttcctttctgctgctgagtagtatcgcagtgtgtggacacggcccagtatgcttctacgctcatcgattgatggatattttggtatatttcagttgttcctcctttggggctatagtgaataaagctaccataaatatcctgggacatgtgtttgcatttctcttggtaaaaatctaggaatggaatctggatcacatggtaaatgtatgtttacctttataagacaactgccaatttcccaaaggtgttttgccattttatgctcctattagcaatgtctgagagttccaatttctccacagcgctgccagtatttggtgttattagtcttttaaattttagccactatagagaatcttgcagttttttggtttttgttttgttttgttttgttttgacagagtctcactctgtcgccaggctgtctcactgcagcctcagcttcccgggttcaagcaattctcatgccttagcccttgagtagctggcaccacaggcacacaccaccatgcccagctaatttttgtatttttagtagagacggggtttcattatgttggccaggctggtcttgaactcctggcctcaagcgacctgcttacctcggcctcccgaagtgttgggattagagggatgagccaccgtgcccggctaagtcttgtagttttgatttgcatttctctgatgactaatgttgagcatccttgcacagcttcctttacgaagtgtctgctcagtgctctgagcattttttatttggctttagtctttttgttattgctttgtaggagttctttatgtattttggatacaagtctgcctgctttttcattttcttactggtgccttttgaggagcagaacttttactttcaatgaagtctagtttatcagattttatttcatgtttagtgctttctgtgtttttgcctaggaaatctttgcatatcctcaggttgagaagattttcccctattttttcttgtaaaagctttacagttttagcttttacattgaaggttatgattcatccaattagtttttgtatgtggtatgagctatggctcaatgtttcccctcccccatacatttattcagttgttctaggaccatctgttgaaaagattgccttgctccaatgacactccaaggtgtcttgattgaaaaatcaattgataatatatgtgtgggctatttctgggttctctattcaggtcattgacccatttgtctattctttggtcaataccacccagcttggttattgtagctttatagtaagttttgaaatcagatactgtgaattgtccaaatttgttcttctatttcaagataattttgcctattctaggtcctctgcattttcatataaattttagaaccagcttgtctgtttctaggagtctgttcaaattttgatcggattgcgttgaatctataaatcaatttggggagaatgaatgtgttaacaatactgatcttaacccataaacagagttatatctttctatatttacttttttctttgatattctttccgcaatgttttgtagttttcagtgtagaggtcatatatacgtttgttaaatttattcctaagtattttatgttatttgatgctattgtcattggaactttaaaatatttcattttctttctttttggagaaagacacttttcgttagcattgttacaggcaatgcattatgtgagctggtcctgtgtacaaccatcccaagccacagcagacacatcagtagataatatctatctaatattgtacacagcgcagaaacaggatcaccctgaatgtcaacagaagactgaaaatcactttacaaaaaaaaaaaaataataacacccattttcatattttaaaaagtgccagcccttgagcagcagagtttcggaaatgcgggaggacatgccaccaggtgccttcgctggaacgtggccgccagccgtgagtggccgggcccatcccgtccaaagacaaatgtctggagtgcttccgctcatctttaaaaggcggccaggcccgtttatctttggagttcttctgtcttaggattttccctctctactgtttgtaatttcatgagcatgtcagcctaacggtgagccgaccttcaggctcctaagcgtgaaggccggagactctccctttgtaaggcttaaatctgagtgcagcaaagaatgaggaaaccaaccccggacattttaaagtcgaatgacaatggagccagtgccaatgttgagaagcactaccaccgtcccttagagttctattttggtaaatacgaatgtttaaccagttggcaaaatatttaacccagttagcaaaattaacaccgtcatttccatagttactctgccgtgtatggcaaatgctgcaagatgaacatcccatttgatgaagcacatttgagaaatgtttgccagaaagtgtgcctctgtctcaggaccctaagcccagggggatgaacagagaccccagcagctctgtgcctgctgccgtgcgggtgactcctcttcctgccgacaaggtgggcgatgagaacgaggaggcccagtcccaccagggcgccgccgacggcgatggggatcggcgtgttgttctcgcccagcagacgctcctccgcagatccgaactggttgccttccaccttgaaagcctggccccacactgggaatatgttgattgaaaacgccttcgtgccgcggacacgctccgctccggctgtagaattgccgatggctgcccgcaatgctcgcagggagtcgttggcagctttaaaagtggggtctctggggtcaggaagagtcgtattcagctggattcctcgtaggaaaatccggctagaacctgcattcatccccaaccggaagcccaggaccgtggtgccctcgccgcgccgctcccgggtctccaggtgggcgccgcgctcccgctggctgaggtcatgcccaggtcaccgtcgcgtggtccctcctctctgggtgaggttcagctgcagtcccgcgctggccggcaggcaggccccgtgggtgccgctcacgctgtacctggccacggaggggagaaggggctctcggcgccgtggcggggaaggcgcgtcttgctcgtggcgcgtctctcccttgctgaagctgctgttggaaatctaggcctggatcggggcaccgcggagcctgatggtctcgctgttcgtgcggacctgggggccttgatatctggtagagattccacagtcctgatttccttggagcttgcactgaggaaaatgtgtgtgtctgacaagttgtaaacaaaactcatgagctggacgctgtcacgtgtcgcacttcttgtgaaatggaaggtcagtgtctgtcttcctccaaagcacaatcgcgtgcctggggtcggaagtgttctctttactgcaagagccactgtcaagcacttccgcattggatggcaggtcaaaggtcacattcttagagccactcttagagtcgtagttcatcgagaaggcagcgaagctggccattacgcaggctgtcccgttgccctttttcaccgcatccgctgcggctgcaccacgcacgaggcccagcagcagcagcagcaccaggggcagccgggggctccaccagatgcagcccgggcggcaggcgcgaggggagccggtgtgtggggaaccggggcgcggggaggcggttgcggggcgctggcctgaaggacggtggcgttcctggaccaaaaatattccattttctgtttgctgctatatatgcaaataacattaatttttataaaatcgtgttctctgaacttgctaaacttacctattagttctagtgtttgttttgtagattcttgggatgttctatggaaacaataattttgtccctgaatgaaggcagttttacttcttccttccttgtctttgtgccttttattttgttttcttgccttactgcaggggctgggacctacagtgcaaggctgaatagaagtggtgagaagtcctccttgccttgttctcaattttagggtgagagtgttcaatattttaccatcaaaagttagctccaggtttttcataggtgcctttcatcagagggaagaagtttctttctgttcttaaattttgtcaaatgctcttttagcatctattgagattaccctctatcttttcttttttattctgttaatgtaataaattgcactgactgattaattttttcaatgttaaattaactttaaatttttgagataactctgctatgtgctattgttgccatataatttacacttacatatattacaaaccccacaatgcaacatcgaaacttttgctttaaatagtcagttgtctttttgagaaattaagagaataaataaaatatagtcttttattaacccacattatttatcatttccagtatggttgattctgtcctgtagacctgcagttgatgtcactttatttcagcctaaagaattttctgaagcatttttgctgctggtcttgataataatgaaacctctgtttccttctatctgaaaatgtctttttttgttgtttgttttggagacatagtctcactctgttgcccaagctggagtgcagtggcatgatcacagctcattgcagcctcaacctcctgggctcaagtgattctcccgcctcaatctcctgagtaggtgggactacaagtgcatgccaccacacctggctaattttttttttttttttgtatttttttgtagagatggggtctccctatgttgtccaggctggtcacgaactcctgggctcaagtgatcctccttccttggcctcccaaaacgctgggattacaggtgtgagctactgccccggcctgaaaatgtccttaccgaagacattatccttatttttgaagtgtattttctctttctacagaaatttgagtagacagttttttcttctcttggcactttaacgatgttattttgttggttcttatatacagcagtcttattgtttccctttatgtaatgcatcttttttcctttagcttttttgaagattttctcttacctttggattttagtagctggactatgaagtacccagatgtggttctctttgtctttttatcctgcttggggtttgctgagattcttggatctgtagattgctgttttatgtcaaattcaggacatttttgacaattagtttttcaaatatgctttttttctgcttgagtttttctccttaccttctagggctccaagaacatgtaattagaccacttgataccatctcacaggttgctgaagttctgtttctttctctgtctttttccccattttccccctggtttttaaattggataatttctactgatccatctttaagttcactgtccctttattctacaacctgctgggaagcctatccagtaaagctttcgtttcagatacggtactttttggttttaaaattttcatttggaagcataagaaacaacagctaaaataaaaagtgactaataccttctgcatagcaaacaatcaataaaatgaaatggcaacctatggattgggagaaaatatttgcacattttataagggacataaaaatcttataaaatatatggtttgcaaatattttataatatccgaaatatataaggaacccacacaactcaacagcaaaaaaaccaaaaaacaacaccaccaccccacacatccaaataatctgatttaaatatggacctgaatagacctttctcaaaagaagacataaaatggccaacagatatttgaaaagctgctcaacatcattgatcatcagagaaatgcaaacccaaaccacaatgagatgccacctcatacctcttaggatagcttctaccaaaaagacaagaaataagtgtagacaagggtgtgaagaaaggggaacctttgtacactgttggtgggaatgtaggttggtgcaaccactgtggaaaacaatatggaggagcctaaagaaatgaaaagtagaactgccatgtgacccaggagtcccacttccatgtatatacccaagggaaaggacatcaccacctcataaagatacctgcacttccatgttcattgcaccattgatagccaagatattgaaacaactgaagtatctgttgatggatgcataaagaaattgtagtgcttataaatacagaggaatattattcagccttaacaaagaaggagattctgccatttgctacaacatggatgaacctagaggacattatgctacgtgaaattagccagacacagaaaaaaatgctgcgtgatctcacttatatgtggaatctaaaataaaaatggaatacatagaaacagagaaaaatggtggttactagcagcaggggaaggcacggtgggaggtggggaatgagaaaacgttggtcaaaaggtaccatgttgtgattatctaggatgactaaggctagagctctaatgtacaacatgaggactagagttcattgtattgtattgtattgtacactggaaactggccaagagcacagagtttaggtgtccttaccacacacaggctaaagcaaaggtaactatatgagatgatgggtatgctaatttgcttgactgtagtcatcccttcacttcactttgtatatcaagataagtacagttggtcctcccatatccacaggttccacatccctggattcgatcaactgtggatcaaaaagtattccagaaaaaaggatagttgcatctgtactgaatatgtacagactttttctgtcattatcccttaaacaatacagtgtagctatttatatagcaattacactgtattaggttttataagtaatctggagatgatttaacgtattagggaagactgtgtagattacacataaatctacaccatttaatagaagggactggggcatccatggattttggtatctttggggtgtcctggtccaatccccatggatgctgagggatgactgcgcatcacgttgtgcaccttaaatatatacaatcgaaaagcaggtctaaagcaagaaaaaaattcctgtttggttcttataatgattttgtactgtgtcaaattagctaagctggaactacacttccagactcaatgcccagtgtggtttcgagtcagggtcagccaaagagaagtgtgtgtgagatttgcagacagaagtgcagcagtagccgttttgcacactgaagtccgcacagaataccaggctctgccactctttgctgtaacctaccgtcgtgctttctaggcatgggccgaagccagattcaaagccacccgctgctgctggctctcctccttcagtttccctgagacctaacctggtgaggatgcagctcctcatggaaggcactggctccgtctgcgggtcatctgccatcctgatgggtagagttggtgagtgacagatgtgggtttcagtttgttttcacggattcctgtttttcctcttgagttccagttcgttcttgctttcttccacatctcatccagctttccttcccaactgctggtcatgctgacctacaatgacttcaagctcaccattggatgcagacaccagctttccatagatttcataaacagctcccacagtttcataaggtctaatccctacgataaaatcctacattctatcactcccaggggctctgttctttgaccaagccctaaccatttctccgctgagattctccatctgttccctcattatgaacatcttttcctttacacagttacaatgtctgcactaaagtcattctaattctaacagctgggtcataacactttttattatatactggatatttgaggggtaggctgtagatactcttgtcttcctttgaaggtgtttttgtattaagcagtagttaaatgatgggttgataagaactgagcatatagaggcttgaattcacattttgtttgggtgggtctgtctcagctttgtctttaggcctagggcgaatctcttggtcgtgggacagtctttactcctaaggtgtagttcttctgtgctttcaaaggaaatcctgaggtgtttaccaagcccctccacctctgtgtgactcacactccaaactgtccctactacacgtgcaaaagctgagatcccgtgttgagatcctgctctggaatcctgctttcggctttccgtgttgcattccactggggcacctcgaggcttccctgtgtctgcagggctcaggagtcagccaggaatttcagaggagtttgtaaacagatttggggtctagcctccctgtggctcgctgcttctgggctagccctcctcatttccagacactctggaaatgcaaattctgttctctgacacttcacggtgacaaccttgcagccttctgcttgaattctagctgttgcgctccagacagactggggagtgccctttgggaaaaagagccatcaaaacgcatatcacacccaatgcagttctcttgattcaagggttgttgctgcctgcttttggtcgctttcaagtgcctttccgtttttgttttttgtattttgttcagagtttataattgttatctgctgaagggtgagtctagtcaagctacaccttactcaaatgaactttgagatcaccttttaaggctgaagtaaaaggaagagagaaggggtgtggggggttgggagggggtctgtgaattctgttaacagaaagagagagcgcgagaggtctggaagacgaggctgggagtaaagaggtatctgagcaatctgctcctttaatacactgactccttctgccggacaaaaatgtgaggggaagagagagagagaaagacagtgtaagagcacgtcacagagtactctagccctgtgttcctgaaatccagggtgcagggattcaagggcactggaggaacacgaggcaaagctgctctgaatgccagccgctggtgtgtgtgtgtatacgtgtgtgttgctggtggtgtgtacgcacgtgttgctggtgtgtgtgtacgtgtgtgctgctgttgtgtgcatatgtacacgtgtgttgctggtgtgtgtgtacacatgtgtgctgctggtgtgtgcctgtgtacacgtgttgctggtgtgtgtacatgtgtgtgcttctggtatgtgtgtgtacacatgtgctgctggtgtgtgtacaaatgtgtgccactggtgtgtgtgtacacctgtatgttgctggtgtgtgtgtatacgtgtgtgctgctagtgtgtgcatgtgtacacgtgtgttgctggtgtgtgtacatgtgtgtgctgctggtgtgtgtgtacacgtgctgctggtgtgtgtacaaatgtgtgccactggtgtgtgtacacctgtatgttgctggtgtgtgtgtacacgtgtgtgctgctagtgtgtgcatatgtacatgtgtgtgttgctggtgtgtgtgtacatgtgtgccactgatgtgtgcgtgtgtacacgtgtgtgctggtgtgtgtacgtgtgtgttgctggtgtatgtgtgtacacatgtatgccgctcgtgtgtgcatgtgtacacgcgtgttactggtgtgtgtacacgtgtgtgctgctggtatgtgtgtacacatgtgctgctggtgtgtgtgtacacgtgtatgcaactggcatgtgtgtacaatacacgtgtgctgctggtatatgtacatgtgtgctgctgctgtgtgtgcatattcatgcgtggactccagtcagtgcagttaatttggaagaacccagaggctaggaaggaacactctgtctgccccttccctcccccattgctaattattgtttgaaatgatcaaaaacgagaatgacagaacgactcctaggttagactccaggacactttgctcttctgctttcttcttttaaacttgtgtctgagggtgtctggccagcatgctgctgatgggttagaaattgtggcacctgttactggtctgcaatttgggacaaaacccctgccatcaaagtggcaaatgggaggcccgccagccaaaactgggcttcttacgagtttaacatcctagatgttggcccaggttgtgtttttaacatttttggaatgagttgcacatgtttcaaacatgggtcttagccgtctcctgcagatggtgtgtgttctctcatctgccacagttcccagagccccctgcacggaggcctgtctgcttctcttactcgtgtttattaacaaatacaagtttggccccataggtttctgggtttgtgagtcctgccttaaatcatgctgttgacgtgtggaaaataaggatacctataaaatcccctggagaaaacaacacggcaggcggtcctgtaccgggagatggctcgaacagtaacagttattcccacaaggcttttagaaagctttcctcagcctagacctagacctggagacggtttctactgagaaaccagctcgtaagttgagacacaccactgagctgagagggagggctgggatagatcagcaggcaggccgaccatggggcggttggatggctctgtgagagctgtgtggaggagacagggcctttggcagtgaagaaaacgcagccactttggggatgagtggcagcctaagacatcagagcagtgagagccagacactgcctcggcggccccacaccagcaaaatgccctgcacagagtggaggctgccaggctcctggggtcagggtgaagagatggaggatgaaggaggactgtgtggtgatagaatggggtagagggagaggagaaggcgatgagtgttcaaggtggaatagaaatgctatgctaaagcaaactctgggaaacctttaaggctggagagttgagaattcagggccagtcctacagaaaaggccttctagagcagtggttacgaatgggagatctcggagcagttacacatgggctttgcagttgatcatctgggtgaccctgggcaagtttttagcctctctgaatatcctcatctgtcaaatggggataggataggcccaccctcaggttgtgagtgttcaatgagtgaatacttgacagcgcccagcccagtttcttataaatgttagtttccatcattattattagctgtactaatagtagtaagacatgaacccctaagtgccatggaacgtccattatggtcatgatcgtcgtcatcctcattgaacgttctttatgttgaagcacccgtatatcaggaagcctttgcgaaattgcaaatatgtaacccagatggtctattagtagcaatgaacaaactttgaaaggatgggcagaggtttcagaagttcagcctactgcatttggttaggactctgcctcagtggctctgagaagcataaaagcagcacgagattcctgggcactgggggaaagggtagaagagaaccacacccactgcatgtgtcagtctgtattagatacagtatagccacattcagatctacctttaagctgtcctgtgccataagcagactaaattcttcattgtcagttcagtgctgtggccgtgctgggctccatgagagctcatctgtgcatgtgatcaggaatctggttgggataaaggtgggtgcctgtggaagaagcctctgttcttttggatcaggagaaggaacagctgccactggtggtctgacctcactatagtgcccagtctgcctgcaggaggcctttctcagcccagagcttacaaaaagccaggcagatgccaccaaaatcagacactggtcccagtgaaaatcagtctggcctaaaagggatgcttccttgtctctccctgtgctttcttgtttggctttcatggaggtctgtgttgtggaagaacttgggtctaattgctgcaggcagatgcctgtgctctttcagctgaggcagatgggcaggggaggaggaggtgggggtggctgtgagggaggaggtgacatttgtaaatatgtcaagggacaatgcagaatcagtagacacattggaaccttttaagtgagaagatgaaatgatcttttataaacgatgcacatggttgtaaagatagtaatgggattagtgagggcattgattcctaactatctgggaatgacagtggatgaaaatcagctgtagggaatagtgaatatttcaatctcttcctgtataacacttcacaagagctgcttaccatttacaaaatcagctgtcacgtttccccttttcattataaacaacaaaagggccagtagcaggcagcataaggaggaaagaagagctgtaaatgccttggccagctttctccccagctcagcggtctcccaaaagccaagcattgcatgagcaatcctgtcattccctggctaggtgtttctccagggccaatgcaccctgcgtatactccctaatggaccctctaggtgcagcaagcactcaactcttcagctataattaggctaagtccaggtccctcgtcactactccaaacccaattaatgaagatgccttcctaggccatgccctggctgtttctagctccttacccctttatccatcggaaccttcacatccatcgagagagtacctgtttccctattgatcatggctgttctcagcttcaggaggaaagacaatggcattagttccttggctcacaggggatggtgaaagtatggcattcttcagaccagattagaggtgatccccagaaacacttttggttcttccctttttcctctgagagagataccaggagggaagatggacctgactctaagctccatctagctcataattccaggcattcaccaagatcccactcccatgtgcactgatgcattggggtacagagtgccaagttgctgggacataatttcctctaggacgagatattgcaatcaaaagccaggctaaaacatcactaaaactcagactctgcagcttatacacatgatctcatccagcctcagtagtccttgtgattcaagaagatattgttatatttttatagttgttaaaagaattgctcattttaggcattgcttgtggcttgagcttggaaaggctctgggatgaacctgttctgcctgacaggaacagagtgacctcaaagctcacagccacacagctgacccatttagttggatgtagagcctaactagcttcccttccccctattttccccactcacagattcagcctggtcttcccactccacttcggagagatccacactgttgtagttaggtttgggttttagtttcttcccctctctgtactggagtgggcaggtcaggaagaaaaacatgtggtcagtatacgtcctgctcaagtttatctcttctacaaagcctttcaggtatattcataaaagcaaaggattccttagaaatcaatcaatccagtaattacttaaggttatctgggcaaattccacctgatacagagctccccttactgacatctatgacagatggtctcacggcctctgagtgaatcttccccatggcagggagctccctatctcgtgggtcagcttgttggagctttggatagccctaattgttagaaagttcctcctcacacaaagctgaaatccatctccctgttacttccatccactgatcttccttctttcccctggagctgcatagaatgtgttccacctgacagcccctgggatttccaaagatacttgtcacgcctaagacttcactgctccaactgagtttgcccggtgtgcaggtgcctcagctccctctgaatatgttgtactttgtcttcaatgtcactctcaaaatggagttcccaggacaaaagccaaccttccaaatggggtctgaccagtgtggcgtgggctgtgatctgtgcactaaggcgtcagggggccctgactgctgcctgcggttctgctgttttcctggccagccgcactgacctggcagttcaggcggagatttcagacagttcagtccccttggtcttcctcatgggacacactgtcaggtccctcttcacaatcgtaagcttgggcactgagtatttcgcagagctctccaggcatccctaatatatttcatcttgctagtttcagcccctttgttttaggagactgctttctgaatactaattttctcatttaatgtattagccataccttccagactttatggcatctgccttctgcattttcatcttagggataaaatatttgaatgggacggagacaaggacagatcagtgcttaataaagacctcccttcaacttgacatacagccattaatcaacatgctgagtgttattattttctggccctgacttctctctctctgaagccaagacagatgtcaccaagttatctatgattaggtctgcagcacttcccgggtttagtttattaaccccaatcaaaaaagcaaagaggatagtttatcattgaggtaaattaaggattaattaacatgtctgctttgagccaaatgaggcccccagcagatgcctggacagctccggtcccctatcactgtgtatcttgcttccgccagttttttgtttgttcacttttttcggggaagtgtcgtgctgatttcttgcctgttcaggggatctgtaggatcccctttcccctctttccctcctttcccatgcctggatcatgcttcttggtcttattaatgaccatactcatcaaacagccctgtcctgccatcttttacatgggatctgtttcctttgggtggggctcaacattccattgccatttcctaaatcctgacaaagcctgaagatcatctgtagctcctcattttaaaactgcaattctactccattaaatactcctacatggggcactgacatggaaagatttcagtccaatggcatggctcttttaatttattactgggcatatcctcgttattttttctttttcaaacgtaactattgttttcctgatagtgctttcctcagataactcattactttggctttgctatatcttttgttttgtaatcgtgtcctgtgtggtattattccctaattgtttcatttgtgtaagtctagttttcctaattagagtacaagcctctgtttatagcattcttcactgcatcgtgaggtcaggcacgaggaggcccacagtgtgaatccactggttgaagccttatattcgtctagagtacatagatggtaacaggcagtttatgatcagtacccctcaattctacaagtcagctccagaatcagcatattatttccctagtgagtcattctgctggcactggggctgtcccccgcagaaccccttggtacaagggagtgacatgttatgggctcagatgcttgcccagcagagcctgatttggaagacagcatgaacagagtggcttccagtgtgccctgatctctctctattcagaacccctagagtttgccttaaatagttaatcattgccttgcagatattcagtgtctatttgaaccaaatggaatgaatggagtgtggcttagactgacctctccaaatgacacctgggcagatgaggccctaagttctccggaaggtgctctgctgtctgtcctctgttgccatctgttattcaccataagactggtagagggcaaagggctacgattctcctaggactttagctcccgccgtcccaacagccacactgagagctgtggtcattattgctgcatagtgctcaagtgcatgactagctcctggaggcagagctttcagataagacaatgcaactttcttcctcagccatcagaggctcagttgaactcatgtgaaaataccccagcctctgtgtcacagtgaagagggctgggagggccaggagcactcaggaatgcatcctaaggtgtgctgctcaggagagggctcccctgccatttccatgcttagctccttgttcacccaacttcgcaggcccccagagttctgagagactccaagcagatgtgaataatggccctgcgggctctttagcctcaaaactgcacacttcgttacgtgctctctggcccactcatcagtcatttcacatgtttttgccttgtctcttctgatagaatctaaacaacttgaaaacagggaccatgactcgaatacattttttttctcatattacccactgggttcctaaatggagcccaatgtgtgtttgttgttttaatcgtttttgtgaattacccccaaatcccatacagtaaggatcccaaggcaaagaagatctgtacctaccaggggccggaggtcgggatgggagaggatgtagccattgttggtgttcagaaaggcgtatccgtgcactccaagctgccagagtccagggtggaggcgcattaggcctgctgtttgtgctgggcatctggagttgggcaggggtttgggggccacaggacggtcaaagatggcagctcacagcagtgagtgttttcaataggaacgtaactgagccagtgccatgcttccatcattgattgaggagtcctttccaaaccggactgtttatagcaaccgtcatcatacatattattacctgacttctttaccaccacatgttctgggtgctttgatgatgtaatctcactcacccttacagcaggactgtgtggcacggaggagcagactgagaaactgagacactgggcagggaaaggacttactgaaggccacagagcaagtcatagttcgtggtgggaaagggacccaggggcaccagttgctgctcccctgctcagcacctgcacttcttgggcagtgatggaggggccccaccccagctctgggcttggcttgcctggagagaggctcccatcacgggggagggagtttgctcctggggaacctgtgatccccacagggaacagacccaggctcaccttgtaccggggcgccagcttcatcagctctctcagggccacatctgagcccaccacacccaggagaatgccatgggatcgctggaaggaaagacacaaggggtgggggagacccagcttccctgtgtacaaggttagactggaccctgggcctgtccagagcctggaagaggaagccacttaggctttaagtggttcttcctctgcaattagattctaggctgggaataaaaatctagactctatcagacgaggtcccaggagcaaaaccagctgctaggaagattaatacccagtattaatatttaagttgtaatatttaaatggaatccaaagttaaatgaaatattaatcttcacggcacagggcgaagttatcgggatctcagggaccataactcacgggggctctgaagcatacagagcctgtaatgaaacatttcctgacctgatggaggatggaaggctcaagaaatcccctcaccagaggcctttacagacaagttagagtctgcacaacctggcagattaagcatggctttgcaggaaggctgacgggaaaccctccggtcttatatccccaaggcaggggtcccaactgcagagcagtgaagctactcccagccagcctgcagtcactggggaagctgtggaaaagcacagaccaccagcccacctccaaccaggagagtctggggtagctactctgggacaggcctggaaatctgcattcaaaccctcccaaggtggctcagaggcacagccaagtcaagaatcactggtctaaagatggcactgaagccccaggttctaatccctgctacaacgtctccaggagcggccactcaccgtttcgttcttcttgctgaagactggcatggccacagtggtgagcagtgtcaggctctgagcctgcgagctgaggagctgtaagggaggggagaacaggggtcagaaggtgcggcctagggccactggtttgccgcactcggagcacccagtgcggagaacccacagtcaccacatcaattatccagcgtcaccttcccacaggaaggaggaaatcccaaatgaggattcccttctctgcaaaaggagagttggcaggaatgctgggggccagaagtggactggagggcaggaccaggctgatgtcactcagcagggtcctgagccccatgacccagccccaagcacattcactaagctctctcgtctcagcgaggcccaggccgagtgttaagtgcaaacccaggaaacaggcccatctgcgcctgcccagaaacagagaggctttgcacagcacgagctttccagaaacctctgatatggacttaaggttgctacaggtgagagggaggacattgacccagagctacccagaaacacaagcacaccccgaggcactgcagtgcaaaggcaggccgtggtgcagctgtggtgggcttcggggccgttcctaggacacaggtcagacccacatggactccactcacagcaccagagccaaacccttgccacctctagacggctgtccgccctgactggctgggctcgccgtgccggctcctccagccacttgaaaggggctctgcatgtgtgccccactttataacaaaagtaggcttctgacaagcatgtgggaagagaggtatcgtaagtccgaccttggatgagatcaactaaaggggactgctgagtcatggaagtccacagttgactttcttggagaaggaagcacattttggccaccacgtctctttctctcatctcatctgagttttcaatttagagttagaagtaaggctttctgagagtgaaccacgatgacatctaattgttttctgagcttggacacatctctatgggctgcatgagggctttccagtctccttcctgagttaggaatgcatgaagccagcttgtccctggctcccagagagcagctcccaggctcttggaggcccctgtggcctgctctccctaggacatgtctcagtctgggaggagtccagtcacagctgtccctgcactcatgtttctggatacccttgcaagggcggacacctgccctgggctcaggggagtgacatcctccactcagagggttccgaagtgggtccgggagacctgcaggtgacccttaacttcagggactcctaagtcagggacaggagagggaaggaggaagacagaggagatgtagggactggttgcagggggcggttctcactgagggacaggtgtaaaagtgaagatcaaactgtgaactgtggcctcgtctgtgtgcgtggaggtaagagagcgtcagaaggtcaggctgtccatagaatgctaaggacatcctagcaccgtctgacatcagttgcagcacacagggaacctggggttgcctctacccaccttctgccaaactcacacccaacactccaggccaccttcagcaggtatggcctatgcccggcttctctcatcggatttcatggttctgaaagccttcgctttccagctcccgtggcatgaccacaacactcccaggtgagggaggcccacacggagcaccggagccctggcccctcctgctgggctggctactggcaggcagatgaatgcacgggtgatggagaggaagtgcaggtgccagggttcacaggaagacagctcaaagaagatcccctcctgtcctccttctccccacccacctctctctcatcaaacctggacactcagggccctatgaacacttggacaagggagggagagccctgcccaaaggcagccagctcgtctcttctcagcagcagtcggtgatggtcagatgacatctgctgagcatggccgtgttggcggagcccctttaaagtagattaatgagcttttcatcccaaatttggccagatggcttatgtctactattaacaggtggaggtaagtaagcatgccactgcttttggacatagagcaactcagaagaaagctgaccattgcctcgttgcattcccagcctcctttgtcagcacagggactgagttctggccagtgaaaggtgaattctgggttctggcaagagtccctgcaagtttccctcacaggggcgaagtatcccccttccccttccacagcctgatgcttaagtgtggtttcagttgactcatgttccaccagcctcctgagcatgaggatgagggccacatggctgggacagcaaaggggacagcagggaggagcctgggtccctgatgaccaggccagagagctcgtggtcagctctgggctttgtttacccaagggggacattcacttctatcttatttaagccactcttttcaggtctctctggagcccagcctgatacatcatcactgaagcaggtggctgcctatgtgatggggatttgagaaatggcagaaaggtctcccttccccagaaaggtcccatgtgaagctctccctttgatgttcattctttcgtgcaagtcattgctgcctacagtcctttgaaaatgcagggacccaggaagggagaacgtgttccagctgtgggatggtggattcttggtctgacccctttctgtcccgggtgggtgggagggagggatgatgagggaggcgaggactgtggaggaggaggaaggaacaacttcggagcagggaccctgtccgtggagagcacctcaggcaggtctgctgggggtctaaggcagcatatgagcagtggtcccattagtgggccaagggctgtcaggaaaagaggaggaaaagcatggaaaagcggcttcattcgccccttcttaatgttccctaaggaggtgctaggcccacccctttcctgacccaggaagtaacttcttactccctggggtccctaactctgaggtgggcttctcgagctgggagctgctgccaggctcaccttgctgtccatgtaggcctctgtccagatgatgtcgtggtcgtggttgatgaccatggggcggctgagcacgtgcaggtattccatcacgttctcctgggtgtccgccagcgttgagatctgcgtgtagtagcctgcggtggggaaggccgcgtgggtgtggaaggcagggcttccctgggaacccctcgccagggcctgcaccctccccagctgcagatggctcatagccgaatactctctggaaactggaccggggcacagggagctgcttccccacagttgtgtcctttacccaggggcagccgcaggccagtgggaggccaaggctcactctgctgcaccctggaagatctctgaggggctgtcccacccagagctccggaaggagcagcagggcctgacgcaagagtgttgggggtcagcctctccctctcccagcctcgccctcccacttcctcacaggaacatctcatgagagtgccctgtaagctttcttctgccactcttaggtctcttcagggaacccaatcagaggcagagatttctgcctctccgctcctccttcctctggtccttgttcttgctcaggttgtggggtgggtgttacagcctattccctggaaccatggtgacactccaaagcgcagatggcgcagaaggctgtgaatggcctctccacgcccccacctcccaccgtgttcatccccctcgccagtgagatgcagcacctctctgctcccagcaggtctcagaccctttcagcacactgttccctctgtctggaacacccttccagtcgccccactgacttggagagtgcctcccccatggcccccggcaccctgaacagtctgtgtctctccaccatcaaagcacatttcaggctgcatcgtgggtggtgttttacttgtatgtctccctgctggacaatactgagaggtagaccgaccctgagtccatcctgatccctcttggtcccctggtgcctggaaatggggccaggtgcatagtggatgctcagtgaatttttgttgaatcaatggggtctggtcagagatagatgaggaccattcacacacaaaacattattccagagaaaacagtgaccctctgctttttgtctgggagcagaaccagagtccatggcttactttgctgaaagaaagaatgggggcaggatggagacagagctgacattgtctcaccttgctttttccaaatatgaaggagggactgaggctgctgttcttgacatagcactgctcctcttaggggcccatggggaagcccgtgctcagcacttccagggctgggtaaccctgtctcctgtgctcaggtgcaggtgggaaggtacctgctggcccggcactcacctttgttgttgcatgcaatccacttcatgcggtcagcaaaagacacttctctcccaatgaggtaagtgaaaactcggacctaacccacaagacacagaggcactcagcagcaaaattcccggccataagtaatgttaacattgtttatatgagtcttagatgttggccccagtgcctctcagtcttcgggttctccaatttcaccccctgaggcccaggcagcaacacaattcgcccagggccatggggactgcgggtaggtgcaaggctgagatttacagcctggcagttctgatgtccccaaaccatattctggtcccttaccccaaacttcctacatcaggcctctgtgtctcgggtagccataattttggaacactcaattaaaatgcatctgaaagcaagaatggctctaataggaaagcagatttgaatgggggccatccttctagggtccctgctggtgatcccatccatggcagcaggagaagcttttttctccctggacacccgtgggagggtcaccttacagtctggccagttatacttctcaaacaccggctcgtagtcctccacggcgccgtcgctgatgagcatgatggcctggttgcagaggcttccttgcttggcctcttggaactgtgtagggaagaggagtgcccatgaccacaggccaagcccacccccctccacctgccgccttcctcccagtcctcccctcccaggcctcattacagtgggcacctgcttcaggatctggaaggcttctctcagggcttggtccacgacccccacacctttgaccatcaactcctccaccagcagtttgaaatgctgccatgggtgagatattagagaagcatcagggggttgagtgggccagtggagcttcatgtttggtgttaatttgggaggctgtttagggccatccagaaggacatgatttcagggcctgtgtctccatgatgcagttcatggactggtcctctacaataggtgtttctcaaatgtccccaagataaactgagagaggggaaatgacttggtacacatccatggccactattgatgggaaacgccaagtgtgaagctgagtacagggggaggacagttctgggatggaggcagggtaacctcggctcccagaccacagcccgcagcccgcagcccaggggtgcacacttcacagcagaaagtgtggaggtgcccagggcagaggcccggcttcaagaggaactcaaaccccaactcctccatcacagagggaggaatctatgatgtgcaaaagctctctttaaaaaattattgccatgtcctctcctccttggtcttttaccagaggaaaggatgacactcaatgaagtttaaatttgtcctcctttcggggaagcttctcatgaaaactgacataatggaaaggtccaggtgggaggcaaaaggggaaattgagtcctatataatccacagggtgaaaaaccagtcctgaataaggaaggttccctttgctatgaggtctctatctgctcactgtttgctctgataagcagcagtgtgtttacagggcggttccctgggttgtttgcatgggtaacgtgctctgctctcattccaggtgccatgggaataagcaaaaagggccacagaaacagtctacagagacaaccgcccaccatccagacaagagcaggggcttggaagtctcaggccaccgtggacactcacctctcgattgtctcggtccgcctggacgaggatccctttaaaacaaggctcgatgtaatggacgtagtcattgtactgcagttgcagtgagttgaggggaggtggggggagaataaacagcatcaggttgcaaagtccaggcccagcaaagacactcatgcaggtcaccgggtggtcaggggttgtgggtcaccttggtacctgtgtatgatttctagagcaagtgagagctattctagaacaggaaggcacatttaccgctatgatattaatgaagtcattctcccccagggtgtccaagatggtggtgatggtgtgcttggcaatagtcatcctcagccccttcatactgccgctcacgtccaccaaaatcactatgtccttgggagaagtagcagcttgaatgtacctgaaggaagaaagggacatgcccaagatgggaaaaccaaagccggaaccaatacctgaccaaggggtctgcagttatttctgttcagatgctggctcgagcccacccaaagttcagggcaacccatctatgccaggtttcacatgttccataaccacttgacacagtgctgaagccatctggggtggcagtggttggggatgtgccacctaacaggccaggtcaagccctggaggtaacgcttgttccttttgatttagaccaaccggggtccctgaggggctggcagcagaaagggagagagctgggcttcagattctgttaccaacttgccacaaaaggggtgtggaaggagaggagagcctaacaaaaggttgacgtggagacagctcagtgtcctggcaggaggtttaggttgggaaagacaaacatgatcagtcctggagcaaggcaattgtagagggaagggaggaatgctggccctcttcctgctcttgtgtcgggctagggttctacacacccaaggcccttgagtggcggtgggggaaggggcggaagtggaggaggatgaggcaaaacccaaaagctatgagataaatacccgggccgcaaacctttcccctgtgagctcttaccagccgcggtttcggcagtcaaaagtaatgactccattctcatcaggtgtccattttatacctgggagaataaagactcgttcttttactagcttggtgaggccaccccagatcccctggctgggtgtggacccccaagatggccatgatccccagggcagaacagctttggagctagggaacagggtggggaacactgggacatgccctgtagactgagacaagctggcaaggagacatctaccagccaaactgcccagatgcagagctgggggtaatttcacaggtaggaccacataggtggtgcctgggactcatttgtgaggcaaaacctcatatcaaatagtggagggggaagctttggagaagtgtgacttttaacatccattaccatccagcaaagtgtggacaaaatgttgaaaaaggcaagtgctctgacttctaacacacttgcctctaggtgttaagctcattagcactcaggatccttcctgttggctgggatgggagaaatgatttggctctatgactgtaggctctttgaggtcagggattcctagaacccagcagagtatatgcttaataaatgtctgttacttgaatgaaaggacaaatgaatggatatgaaagatcttgcgttgacccagtagcagaatgctggtgtagatttttatcctatccacctaataaaaaaatttgtatagatgcacagaaaacactgacatgatccacaatagaatctcgatttgaaaagactttatgattgggaatagtgggtttaaaagaagaagagtaaaaataacaggtggaattgcaatatgttgtgattgggatagacaaaatgattgtagcagtattatgaatgtctagaagctccaagggcccttcctcctccacagtggttagacttcagatgacatacaccctttgaggcattgctggcatctcaaaggtaggagaggttgtcagagaccatgatctcaaaaccaaacaaatgagaacagagccccaggcgtgaggcatatgtgtgaggtcagctagcacccaaagccttgaaggtgggaagcagagccatgggagtgtggtgtgatgggagcttgagtaccactggtctgacctagtcttgcaggcagtcatgggaggtagggctttcctgaggccacattcttacagcaacatggtcatggggaatttgatccttagaacagcaatgaggaggagaagctgagtctgagattactggctcttaaccaaaatcttcgaagaggactttggaggtcctggatgagggtaccctcaagtccaagcggaaacagaagcgaattttcttgtggattcccaactcagacccactggactctgaagaggacaagcagcatggcctcacaagcaaagattcccaaatacataaggagcagacccctattagtgggaggcagcagactcaagagctacctcaagagctggatatagcttctcaagaattacagatgttggaatggccaaataccaaacacaaactaggtaggtatgagaagaacacataatacaaagaacatacaagaaatgaccaggaatgaagaaacagccttgcaaatatgaagctttcggagatgaaaaaatgtataggttgaaaaaaataaattaaatggatagtgctttattcatgggtaaaaagaaaatgcatacatttgtggatgtatccagagttctactgaggctggaatgagaaggtttaatacacatctgattggagtcacagaaagagaaaagggagagcatggaggaaaggtgatggttgaagagatgatactggcaaatattctagaactgattaaaaatccaattccacagatctaggaagcacagcgtatcccaaacagcatgaataaaaagatatccacatatagacacatagtattggaactgcagaacttcgaaggcaaataaataaataaacaaataccacgaaggcagccagaaagcccacgacacctacaaaggaagagcagttaaactggtagattttcccaacatcaatgaaagccagaagacagtggataaacagttttaagatgttgagagaatagaattattgatttagaattgcattgtcagcaaaactatcattcaagaatgaggataaaaggaaacatttgtagataaacacaatctaaagcagtttatactgaagtccccactgtaaaggaacttctggaggacttactttaagaagaaggggaatgatatgggaaaaacatcctcacatgcatgagggaatggtgaacaaataaaatggtaaataagtcattaattccaagtaagtgatgtttatatcaaataacaatacttgtgtgtctgatttgtggggatgaaaaatttgaaatattgacaatagaatggaagtctagaataaagagatggaagcacaaaagttctaaaggcctttgttgactgagtagagagcaaaaatattatttaattttaattttttatttttagagatgggatcctgctatattgcccaggatggtcctgaactcctgggcaagggaacctcctgcctcagccgccccccccagtagctggaactataggtacaaaccaagttcccagcttaattttaaaatgttattgtattaaatatgcctgataagacttcaggggtaataactgaaagaataaaaacaaggggacaagttctaaagtgctagagagaaaaaaagttatattggggaaatttattttttaaatgttaagtatttaaaaaggaaaaaaggagaaaaagaaaatataaaaacaccaggacaagtaaaaatttaaaaaataagataatagacttcaagatggctgactagaggcatctggtactttcctcctccacaaagaaggacaaaaatagcaggtagataatcacactttgaatagatcatccaagagagaacattggaattcaacagagaagtgacaggaaacacctaaagcaaggaaggagacggaagcaagtcaccctgcttggccaggattggctgggagcctctccaggttgctcaatgcaatgaaaggataagtgagagacccccagcagtccacattcccaccatggattcctgcaatcctagctgcaggagagcctctagactcttgtaggccttaagactaacatagggagctgcctggagcctgggtgagggcattgctccagagagggagctcacactggatctcatacacccccagatctctaagcagctgcagcacagcacgatatcaagagtccagactccaccagactgcgtcctgcctgggggcccaacagcttctggatcttcatatccctggagaaccactgacatttccttcccacagccaccaccatggctggatgctgccaccagggctgaagcgtgagctattggcaataaccccactgcccttggcagtgaaatcaccacaaattttcatgcaccctgaagacaaaatcctccatgtacagccgttgcactgtgggctgctgccaacagggatgaagcacaagtgaagcaagcattcgccagccgcctgcatctggctgctgccactgaaagcaacctcaccctccccaatagcagggctgccacacagccactgctgccccaacccgagcattccaccaggggccaagggatcaccccacccttgcctaccacagccagtgtctgcatgccccagcagagggcattgggacaggtccacctgacctggctctctgttccccccatccagtgccagtatcctgtctggggcctgggaactgcccagcccactctaccatcgttggcacctgagaacttctcccagggtcctgagttcagggccactcaacttcctggtaccaccataggttgcacccacccttacatgtcacccactgtcctggggactgaactgcccagctcactgcagccactgccaagagcagcacagaccactttggaggcagagggttgccccaccactgctaacgattgcatcacctttgccacacccacttctctggggactgaaagcctgcccaacagcctggcccaccactactactactgtcccctgagcaagccacctggaggcccaagaattggcctgtctggacccactaacaccagtgccagtgtacacctccctgggacccaaggacatgcatgctcagcccactgccacaactggggcccaaggacaggatcatctggcatccttgtccccagaaaaacttcaccacagcctccactaacaatgccaccctaagccactgaggaaatcacagacaccacagacgctgtttatagctgaagaaatcatattgagactacactactgcatgtgtctaagatcaaagtcaaaatgtcctacccaaccaacaccatagatatagctttaggaaaaagtcctcccatataaaagcaaattttaaaaatgggaagatgcaactattacaccagatgcacagatatcaatgtaaggacacaagaaatatgaaaaagcaaggaaatacgacacctccaaagaacacaataattcttcagcaacagattccaataaaaaaataatttatataataccggaaaatgaatttaagataatattaaagaagctcagtgagatacaagagaatacagaaaagcaatgcaaagaaataaaaaaaactcaggatatgaataagaaatttgctaagaagatagatatcattacaaagaaccaaacagaaattctgaaactgaagaattcattaaatgaaatacaaaatacatttgtaaacgttaacaatagactagatcaagcagaagaaagaatttcagaactcgaagacaggtcttttgaaataactcagacaaaaattttctttaaaaaaagaataaacaaagcctatgtgacatataggacatcattaagtggccaaatgttcacatttttggtgtcccataaggcaaaagaaacaaaaaggatggaaagtctatttcacaaaatactagctggaaactttccaagtctagcaagcgattatgacatcaggacacaggaagctcatagatccccaaacagatataattcaaaaatacattgtagtcaaactgtaaaaagttaaggacaaagagagaattctaaaaacagcaagggaaagttgtctagttgcttacaagggaacttccatgagactagcaatggatttctcagcagaaacctttcagatcaggagagaatgagatgatatattcaaatttattggaaaaggaaaaaaactgctagtcaaggatactatacccagcaaagttattccttataaacaaaggagaaataaaatatttcccagataagcaaaagctgagggaattcatcaccactagacttgctctacaagaaattcttgaattgtcctgaaaaagaaaggacaatatctaccatgatgaaaacacatgaaagtataaaattcactggcagagcaaacacaaataaggaagagtaaggactcaaatgttaccactacagaaaactaccaaaccagaatgataaacaataagagaaaaagaaaagaacaaaggatacccaaaatagccagaaatcaattaatacaatgacaggaatagctctcacatattgataataaccttgaatgtaaacagattaaactttctatttaaaaggtatagattagctgaatggtttaaaaaaaaagggaccaactatatgctgcctagaagaaactcatctcacctgtgaagacatatacagaatgaaacggaagaaaaaagatattccacgcaaacagaaaccaaaagcaaacaggagtagctatacttatattagataaaacaaactttaagtcaaaaacagatacagaaaaatgagatgaaggaggtcattatataatgacaaaaggatcaagttagcaagagtatatggcaattctaaacctgtgtgcacccaacactggaacacccagatatatgtggcaaatattattagatctaaagggagagacagactccaatacaataatagttggaacgtaaacaccccactctcagcattatgtagataatttagacagaaaattaccaaaaaaaatggatttaaactgcacatttgactaaatggacctaggcatgtacagaacgttttatctgacagccacagaatgcacattattctcaccagcacatgaaacattctccaggacagatcatatattaagacacaaaacaagtctcagtaaattaatcccggcactttgtggggctgaggcgggtggatcacgaggtcaggagttgaagatcagcctggccaagatggtgaaaccccatctctactaaaaatacaaaaaaaattagccacacatggtggtgggcgcctgtaatcccagctacttgggagactgaggcagagaattgcttaaacccaggaggcagaggatgcagtgagcagagatcacaccactgcactccagcctaggtgacagagcaaaactccatctcaaaaaaatatataataataataattgaaatcatttctagtatcttctcggactacaatagaataaaactagaaatcaataacaagagaaattttagaaactattcaaatacatgaaaattaagcaacatgcacctgaatgaccaatgggtcaaggaagaaattaaggaggaaatttaaaacttacttgaaacaaatgaaaattgaaaaacaatataccaaaacttgtgggatacagtaaaagcagtataaagaggacagtttgtagcaataagtgcttacatcaaatagtagaaagatttctaacaatctaataatacacctcaaggaaatataaaagcaagaacaaaccaaacctaaaattagtgaatggaaaaaagtaagaaatactggaacagaaacaaacaaactagagactaaaaaattatgaaggatcaacaaaatgaaaagttggtttttgaaaaagataaaaccaataaactgctagctagactaaccaagaacaaagagagaggacccaaatgaacaaaatcagaaatgaaaaaagcatacattacaatgaataccacataaatagagaccattataagcaactatacactaagacaaactggaaaacctagaggaaatggataaattcctggacacatacaagctaccaagattgaactgaaataaatagaaaacctgaacagaccaataacacataataaaattgaaccagtaataaaaagcctcccaacaaaggaaaatctaggaccagatagactcactgccaaattgtaccaaactttcaaagaactaacaccaattatcctcaagttattccaaaatattggagaggatggaattttccctaactcgttctgtgaggccagcattactctaatatcaaaaccagataaagacacaacaacaacaaaagaaaactacaggccagtatctctgatgaccatagatgcaaaaaatcttcaacaaaatactagcaagccaaatccaacagcacatcaaaaatataatatgccatgatcaagtgggatttatactagggatgcaaggatggttcaacatatgcaaatcaataaaagtaatatatgacatcaaaagaatgaaaataaccatataatcatcttcatagatgaagaaaaagcacttaataaaattcagcattgcttcatgattagaaactcgcagcaaactaggcatagaaggaaaatacctcaacataataaaggtcatatataacaaacccacaggtaacatcatactgaatggggaaaatctgaaagcctttcttctaagaactggaacaaaaaaaagatgcccactttcaccactcctattcaacatagtattctaagtccttgccagagcaatcaggcaatagaaagaaataaaaagcatccaaattggaaaagaggaagtcaaactactcttctttgcagatggcataatcttatatctagaaaaacctaaagactccaccaaaaaactcttagatatgataaatacattcagtacagttacaggatataaaatcaatatacaaaaatcagtagtgtttctatataccaataatgaactagctgagaaagtaatcaagaaggcaatctcatttacagtaactaccaaaaaagtacctaggaataaatttaaccaagaaggtgaaggacctgcataaggaaagctacaaaactgatgaaaaaaattgaagaggatacaaatgaaaagattttatgtttatggactgggataattaatataattaaaatgaccatactgcccaaagcaatctacagatttaatgcaatgattatcaaaataccaatgccatttttcacaagagtagaaaaaaatcataaaattcatatggaatggaaaaaaaagtcagaatagctaaagcaatcctgagtaaaaacaaaaacataaacaaaaacaaaaaacaaagctggaggcatcacactgcctgacttcaaagtatgtttcaaggctatagtaacccaaacagcatgatattggtataaaaacagacccaaagaccaatgaaacagaatagagaacccagaaataaatccatatatttagagccagctaattttctttttaaaaattaattacttaattaattagtttttagaggtagggtcttgctctgccacccaggctggagtgcaatggcgtgcaagactcacagcagtcttgaactcctgggctcaagcaatcctcccacctcagccttctaaatagctaggactatagccatgtgccaccacatggcacatggttacattttaaaattttttgtagagataggggtctcactatgctgctcatgctggcctcaaactcatggcctcacatgatcctcccaccttgatctcctaaagtgatgagattacaagtgtgagccaccatgcctggcctcaagccagctaattttcaacgaaggcaccaagaacatacaacaagaaaagaacaatctgttcaataaatggtgctgggaaaattggatttccatatgcagaagaataaaactggatccctatctctcatgatttacaaaaatcaactcaaaatggattaaagacttaaatgtaagtccccaaactataaagctactagaagaaaacgtaggggaaatacttaagaacattagtctctacagaaattttatggataagacctcaaaagcacaggcaacagaaacaaaacaaacaaatgggactctattaagctaaaaagcttctgcacagcaaaggaaacaatctaaaatgaggagacagcctgttgaatgagagaattatttgcaaactattcatctgacaagggactaatatccagactatctaagaaactcaaacaactcaacagtaaaaacaaaacaaaacaaaacaaataatcccattgaaatgtgggcaaaagacatgaatagacatttctcaaaagacatgaatagacatttctcaaaagaagacatacaaatggccaatagatatatgaaaaaatgctcaatatcacgaatcacgagggaaatgcaaatcaatactacaaagatatatcatctcatcccagttagaatagctattaataaacacacacacacacacacacacacacacacacacacacacacacacacaaaacagatgctagcaaggatgcagagaaaaagaaactcatatgccattggtgggaatgtaaattagtatagccactatggaaaacaatatggtgatttctcaaaaaactaaaaatagaactaccatatgatgccactacctagaatttatccaaagggaaagaaatctgtttatcaaaggtatacctgcactggcatctttatcacagcactattcacaatagcaaagatacaaaatcaatctaagtgtccatcaaaagatgaataaaggagatgtggtatatacacagaatggaatatttggccaccaaaaaaatgaaatgccatttgcagcaacatggatgaactggagggtgttaagtgaaacaagccaggcatagaaaaacaaacactgggccgggagcggtggctcttgcttgtaatccagcactttggaaggctgaggcaggaggatcacttgaggccacgagttcaagacaagcactacatgttctcgttcatatgtgggagctaaaaaagttgatctcatgggggtagagagtagaatgacagataccagagtctgggaaatgtgtgtgggtgagtgggggaggaataaagaggaaggttagtgggcacgagcatacaattagatagaaggaatgagctctaatatttgatagcagagtagggtgactatagttagcactgcattgtatatttcacaatagttagaagagaggacttgaaatgttcccaacacatagaaatgataaatactccaggtgatggacatccccaaatactctgacttgatcattacaccttctgtgcatataacaaaatattacatattcccataaatgtgtacaagtattatgtatcagtaaaaataagatgatggcacattcaaatataccaatgttcacaataaatgtaaatatgcttaacttgctaactagtaaaagagattgccagtttggataaaaatgtaaaagctataaactattttcaacagatatggctaaaatgacagaaagttcgtaaataaagggatagaggaaaaagtatatatcaggtaaatactaagcatgagcatgctggtgtcactctatgactatcagacaaaatacacattaaaataaaaagtgttgtaggagttaataaggatcaagcaaatataaaatcagcaaagatacagaaaatttaagcaatacagttaacaagcttgatctaatggcatgtatagaagatttcatccaacaatgagagcacacatattcttctcaagcacatatggaatatttacaaaacttgatgtcatactcagccattaaaataaatttaaattaatttcacatagtatatgcaccaaattcttggaccacaaagcaactgagttaaacatttagaataaaaaggtaaatataaatatttatctacattcccatatttgtaaatttaaaaacacacttttaaataactgaaatatggaagaaatcacaaagaaatttcaaaatatttagaagcaaatgataattaaaacactacctctataccaaaactacaggcaacaaaagaaaaaatagatagactggacatcaaaattaaaaacctgtatgtatcaaaggctacagtcaacagagtgaaaaggcaacccatagaatgggagcaaatatttgtaaatcatcaatccaacaagaggttaatgttcagaatatacaaagaactcctatgactcaacaacaacaacaacaacaacacctgatttaaaaatgagccaagaacatgaacagatatttctcaaagatgagcaaatggccaataagcacatgaaaagatgttcaaagtcattaatcattaagggcatgcaaatcaaagttgccatgagatactacctcacacccattaggatggctactaccaggaaaactaaaaaaaaactaaacaaaaagaaaactgcagaaaataacaagctggcaaggatttagaaaagtcggaacccttgtgatagaggctgcatccttttacattcccacaactctgtgtgtgtgtgtgtgtgtgtgtatgtgtacatatatatgtatacacacaaaatgaaatattattcagcctcaaaaaggagggaaattctgacatatgctacaacatggatggaccttaagggcattatgctaagtgaaggaagcccatcacaaaatgacaaatactgtatgtttctacttatatgttgtacatagaatagttaaattcatagagattggcatagaatgagggtgccagaggctggggggagaagagaatggagagttattgtttaataagtataaagttttgcaagataaaaagagttttggagatggatggtggtgattgttgcacaacaatgagaatgcacttattatcagcgatacttttaataagttcacttaaaatggttaagatagtaaatgtttatattatatatattttgccataaataaaaataaaatttaaaaaacctcactaccaatcaaaacctgtgagatgcagcaaaaacagagcttctagtggcatagtgtagacttaacatttattttagaaatacagggaggctaaaacttaaagctatgtgtctcatttaagaagtcaggaggaggaacaaaataaacccaaagaaagggaaaggagaacataagaaagagctaagatagatgaaatagaaaatagagaaatagttaagagcagtcaatggagacaaaagatgattcctgacaagactaacaaaataaagaaatctatagggaattggaaagaaaaaatgcataatactgtaaattaaaaggggacacaattacagatacagcagagatttaaaagatgataataagagaataatagattcatacaaataaatttgaaaagtcagataaaatggatggattctaaataaaagtacttcaaattctaagaaatagaaagccacattagcattacaagtgatcaataaatcaaagcagtaattttatcttcccataagaaaacatcaggcctatatgctttatagatgaaatctatcaagcatttgaggaaaagatcattctaatcttattcaaatacttccaaaaaccagaaaaagagggactacttccaaatatattctatgaagctagtataattttgaaaacctaacaaggatagtaaaggaatgaaaaattaagggaccatttcacttataaatatagaagcaaaaatcctaaacaaaatattaataaaccaaatctagtaatgcataaaaggataatttactataatcaagttaggtttctcataggaatgcaaggattggttaacattagaaaattcaatagttaagtaggcagaagacaatatgcatttcacaaaagaggatatacatacagctaataacatataaagaaatgctcaacttcatgagtgatcagggaaatgcaatgctagaccactatgaaatactattttatactaaagaattgttaataaaaattgtttttttgagacaaggtcttgatctgtcactcaggctggagtgcagtgacatgatcacagctcactgcagcctcagactcctggggtcaagtgatcctcccacctcagtctcctgaatagcaccacaggtgcacaccaccacgactggctaattttcatttttaaaaaatttttggtggagatgaggtctcactatgttacccaggctggtcttgaattcctgggctgaagcaatcctcctgacttgacctcccaaagtgctgggattacaggcatgagccactgcacctgaccaacaaaaaacttttaacaacattcagagttagataaattgtgcatcagtgggatctcttattcattgcttgtgggaatataattggtgtgagtattttggaaaaccaatttggaattttcttttcaaagttgaatgcccacatatcttagggcctagcaattccattccttgaatgtcattagataatgataaacaggtcaattcagcaagaggatataacaattgtaaatatatatgcaccccacactggagcacccagatatataaagctaatattattagagctaaatagagagatggaccccaatacataacagctggagacttcaacaccccattttcagcattggacaaatcatccagagagaaaatcaacaaagaaacatcatacttaatctgcactacgggccaaatagacttaattgatatttacagaacatttccctcaatggctacagaatacaaattatttttagcacatggatcattctcaaggatagagtacatttaggccagaaaataagtcttaaaacatttcaaaaaaattgaaataacataaagtattttctctgatcacaatggaataaaactagaactcaacaagaagaggaattttgaaaactatacagaaacatggaaattaaacaatatgctctagaataatcatttagtcaatgaagagattaagaaggaaattgaaaaatttcttgaaacaaatgataatggaaacacaacatactaaaacctgtgggatacagcaaaaacagtactaagatggaagtttgtagctttacgtgtctacatcaagaaagtagaaaatctttaaataatctaacaatacatcttgaagaactagaaaaacaaaagcaaaccaaaccaaaagttagtagaagaaaagaaataataaagatcaaacagaaataagtgaaattgaaatgataaaaaaacccaaagatcaatgaaatgaaaagttggtttttaaaaaagataaacaaaattgacaaaccttcagctccactaagaaaaaaagaaagaagacttaaatatataaaatcatagatgaaaaaggagacattacaactgacaccacagaaattcaaaggatcattagaggctactatgagcaaatatatgccaataaattggaaaacctagaagaaatgaataaattcctagacacatacaacctactaagattgaaccatgaagaaatccaaaacctgaacaaatcaataacaagtaatgctattgaagtcattataaaaagtctctcagcaaagaaaaggctgggacctgacggcttcagaattgctgaattttaccaaaaatttaaaaaagaactaaaactgataccaatcctactcaaactattatgaaaaatagaggagaaggaaatacttccaaactcagtacacaaggccagcattatcctgatactgaaacccaacaaagacataccaaaacaaaaaccaaccaaacaaaaaacctacaggctaatatccctgaagagcactgatgcaaaaatcctcaataaaaacactagcaaactgaatacagcaatacattaaaaagatcattcatcatgactaagagggatttattccatgcaaagatgtttcaacaaatgcaaatcagtcaatataatacatcttaccaacagaaagaaggaaaaaaactgtatgatcatttcaattgatgcagaataagcatttgataaaattcaacatttcttcatggtaaaacccctaaaaaaactgggtatacaaggaacatacctcaacataataaaaaccatatacaacagacccacagctagtatcatattagatggggaaagactgaaagcctttcctctaagatctggaacaagacaaggatgtccactttcaccactttcattattcaacatagtactaaaagtcctacccacagcaatcagacaggagaaaaaaattaagggactccaaattcgaaaggaataagtcaaattatccttatttgcagataatatgatcttatattaggaaaacctaaagactccaccaaaaaactattagaactgataaacaaactcagtaaagtttcaggagacaaagtcaatatataaaaatcagtagcatttctatatgccaacagcaaacaatctgaaaaagaaatcaagaaagtaatcccatttacaatagccacaaataaaataaaatacctggaaattaatttaaccaaaaaagtgaaagttctctacaaggaaaattataaaatattgatgtgagaaattgaagatgacacaaaaaatggaaagatattccatgttcatggattggaagaattaatatagttaaaatgtccatactacccaaagcaatctacacattgaatgcaatccctatcaaaataccaatgacattcttcacagatatagaagaaacaattcaaaaatgtatatggaaccaaaaaagacccagaagagccaaagttatcctgagcaaaaagaacaaaactggaggagtaacattacctgacttcaaattatgctacagagctatagtaaccaaaacagcatggcactggcataaaaacagacacatagatcaatggaatagaatagagagtgcagaaatgaatccatacatctacagtgaactcattttctacaaaggtgccaagtacacacattggggagaggacagtctcttcaataaatggtgctgggaaaattaaatattcatatgaaaaagaatgaaactagactcctatcgctcaccatacaccaaaatcaaatcaaagtggattacatacttaaatctaagacctcaaactatgaaactactaaaagaaaacattggggaaactctccaggacattgaactgggcaaggatttcctgagtaataccccatgagcacatgcaaccaaagcaaacattgataaatgggatcacatcaagttaaaaagcttctgcacagcaaaagaaacaatcaacaaagtaaatagacaatgcacagaatgggagaaaatatttgcaaactcctatccatctgagaagggattaacaaccagaatacataagaagctcaaataactcggtgggaaaaaaaatcaaataatcgatttttaaatgggaaaaaatctgaatgtacgtgtctcaaaagaagaaagacaaatggcaaacaggtatataaaaagatgctcaacatcattgattatcagagaaacacaaatcaaaactacaatgagatatcatcttaccctaattaaaatggcttgtatccaaaaaacaggcaattgcaaatgctggcaaggacttggagaaactcatacactcatacactgttgataataatgtaaattagtacaacaactatggagaacagttttgaggttcctcaaaaaactagaaatagagctaccatgtgatccagccatcccactgctaggtatctacctaaaagaaagaaaatcagtatattgaagagatatctgcactcccatgtttactgcagcactatttacaatagccaagatttgtaaacaatctaaatgtccatcaacattagaagaatggataaagaaaatgtggtacatgtatacaatggagtactattcagccataaagagaatcagattctgtcatttgcaacaacatgaatggaaccagaggccactatgttaagtgaaataagtcaggtacataaagaaacttcacgtcgcacttttttgtgggggctaaaaattaaaacaactgaacccatagagataaaaattagaataatagctaccagaggctgggaagggtagcgatggggttggggagaagtgggatggttaatgggtacaaagaatagaaagaatggataagatctagtatttgatagcacaacagggtaactatagttagtaataatttaattttacattttaaaataactaaaagagtataattggattgtttgtaacacaaaggataaatgcttgaggcaatggtatcccatttgccctgatatgattattacacattgtatgcctatatcaaaatatctcatataccccataaatatatatacacatactatatacccacaaaaattaaaaattaaaaaaacagaattattagtttgtggttttgggcaccacaatgtataaagaaggaattttgtgacatcaacaaccaaagtgggtagataaggagctgtaaaggagctgagtttttgtatgttattgaagttaagctgttataaatccaaattagaatgttataattttaagatgtgaaatgtaatccctctggtaaccagaaataaaataactatagaatacatataaaaggaaatgagaaagaaatttaaatgtttccctataaaaaatcagctaaacataaaagaagacagtaatgcagaaaatgatggacaaaaaagcttaaggcttatagaaaacaaatagcaaaatgatggaaataagtccctcaacagtaattactttaaatataaatggattaaactttcccatcaaaacacagagattggcagcatggataaaacataaaactagcaagcaaatctcaggagcatattaaaaggattacacaccataaccaaataggacttattcctggaatgcaaggatggttcaacatatgaaaattgatcaaggtaatatacacattaacataatgaagggaaaaaattccatggccatcccaatggatgcataaaaagcatttcacaaaattctacatcctttgatgacaaaaacattaaaaaaactagcaatagaatgaaactgatataaaaatcatatatggaaaatcacatcccaaatatcatactctatggtgaaagactagaagctttttctctataatcaaaaacaagaccaggatgtccacttttgccccttctactcaacataatattggaaattttagctagagcaattaggcataaaaaagaaataaatgacattcaaactggaaagaaagaagtaaaattatgtctgttcacagatgatctcatatgtagaatgccctaaagattccacaaaaaactgttagttctaataaataaatgcagcaaagtatcaggggacaaactcaacacacaaaaatcagttgcatttctatacattaacagtgaacaatctgagaaattatttttaaaaatcctatttatgataacatcaaaaagaataaaatacttaggaattaacttaaccaatgaggtgaaagacctgtacagtgaaaactatgaaacactgctgaaagaaattaaggacagaaataatggaaacacattccatattcatggactgaaatacttaatattgttaagatgtcagtactgcccaaggtggtctactgattcattgcaatccctattacaatcacaacgagcaagagaaactcattctaaaatttatatggaactcaagaaaccccaaatagcctaaacaatttggggggaaagaaaaactgatggaggcacacttcctgatttttaagttactgaaaagctacagtaatcaaaacagcatggtactggcataaagaaaggtatatagaccaataaaataggacaaaaatcccagaaataaacccccacatatatgattaaatgatttttgacaagagtaccaagaccattcaatggaagaaaggcagtcttttcaacaaaaggtgctggggcaactgtatatccacatgaaaaaacggaagttgaactcttaccaaataccatatacaaaaattaactaaaaacggaaatgtaagacctaaaactataaaactcctgttagaaaacataggggaaacactttatgacattagagttggcagtcattccttgggtatgacaccaaaggcaaagaaaacaaaagataaaataaccaaattggatttcagaaaaaatttaaaagtttgttcatcaaaagacaatatgaacagagtaaaaaggcagcccacagaatgggagaaattatttgcaaatcacatatctgataagggatcaatattcagaatatacagataactcctaaaactcaacaacaataaaaatagtgcaattcaaaatagtgagaaatggcctctctctactgactgatgcgttcacatctggactgtgttgtttacatataagttggtgtctctggaagccctgatgtggcaggaatatttacaggaattccaccctggagtagacaagaggggcacgtgaactgctgcatggaagaaggataaacctattcattgaagctccagagaaccgaaacagccacaatagctagctgtgaattctggcagaggaacacaatgccaactatgggaactgcaggagctctgagttcccttggcactccaagagagagattgactttccagcctgtggacacagtggagtcctctcgggcctttctggtttcctgtttcagaaaagtgggataactttaagacttcctggactgtgtgctaaactataaaaatgggttggggtgaaatggagagctgacttattttaaatgggaatcaaaaagaggtagaactcttggaaactttgtgctctgtgttttctatttttattgatggactctattaagttggccactagccacagagtgtggcctgtgccattttccagattgctgttgaacactcttggcgagtgcgcctcatttttccaattgggacataaagtccttaaggtaaagaattgttttatccttctttgtatcttccaaagtacttttcatgggacaggagcttcatgtgggcattcattgactggtttcatggtgtttgatggtttcattcattcattcattcatccattccacagccctttaatatgtgcatatcatgcagtgagaagggctaaagtgtgggcttggagatgctttgggataggaggaccagccccattcactggggacctgagtgccagggtccatcttcagtgcccctattatttccagagaagaatcccagaaggtcggggagatgcaactccatgtccttacctggatagatcctgaagaatccagttgcactgccaaaatattgccaggtcaacgttgggtctctctggaagttctccacgaagacagcattcaaggcttcagacatgtagactccatttaaaatatctgggtctgaagggtgagactatagattatgatcctgtagaacttctcaggaaaatggtgatcatgcccggtgagggtgcctggtgggcgtgtctggtgggcgtgtctggtaagcgtgcctggtgggtgtgcctggtgggcgtgtctggtggacggcctggtgggcgtgcctggtgggcgtgtctggtgggtgtgtctggtgggccagcctggtgagtatgcctggtgggtgtgcctggtgggcgtgtctggtgggtgtgctaggtgggcgtgcctggtgagtgtgcctgagctgagcgtgccggctacctttgttgtacacgttggtgggcagctgcacgctgctgatggaggtgttcaccggcaggttgctgaagtgagcattggactccaggaggaactcggcgcccagctccacgaagttgcccttctcgtccctctcgttgatcaggaccgagttgtaatagtcgaactggggtggacgggtgaggcccacggaggcggcccgagcaccgggacaggcggagagagaggaagagaaacggcgcaggtgagaggacgagagggccggggccgggcggccatcagagtctacacaagcacccgcggcggcgcgctgggcactgatcagggcgattcgggacaaaaatatccaggaggccggcgcggagaggcgtgaggccgacgtttgatgacagttgtcctgaccgctgcctcagtccccaacttggtgcagcgtgtgttgacacggccgaggcagagtggagacaggcagccgcggagtcaaggacaggtagagacaaaaagccccatcagccccctccacttctcgcaggccaggaaggtcccagagccccagaaccgagcctgcgcaatcttggggcctgcagccttggcctcagacggggcccaggttccgagtcccgcagctgccctcggcctctcccacgcggtgttggagggcgtgctaggattgcctccggtggagccccggccccgtttcctccacacgaccgggttcacacctgaacaccccccaggactgcgtcacggacatccccacgccaactcccacgccggactgcctcacggacatccccacgccaactcccacgccggactgcgtcacggacatccccacgccaactcccacgccggactgcgtcacggacatccccacgccaactcccacgccggactgcctcacggacatccccacgccaactcccacgccggacagcgttatggacatccccacgccaactcccacgccggactgcgtcacggacatccccacgccaactcccacgccggactgcgtcacggacatccccacgccaactcccacgccaggttcctgcaccccacacccggctcctcctcacgacactgtggcccgcgctggccttccacgcatactcccagccgcgtccctgccctgctcaagccttctgcacctgcctttccctgctgagaaaggctcaggctcctacgctgacacccaaggctccccccacctcctcacctaactgtccaagaccactgccttcctcaccagcctctggacacacagggcccaggtcccactgtttcctcaaccaacctggtgtttgtttatttatttgtttatttatttatttatttgagacggagtctcgctctgtcgcccaggctggagtgcagtggcgcgatctcggctcactgcaagctccgcctcccgggttcacgccattctcctgcctcagcctcctgagtagctgggactacaagcgcctgccactacgcccggctaaattttttgcatttttttagtagagacggggtttcaccgtgttagccaggatggtctcgatctcctgaccttgtgatccacccgcctcagcctcccaaagtgctgggattacaggcgtgagccaccgcgcctgggcgtgttttcttatttctgtgttttctttctgctgtgaccaaaggcccttttccaggccctgcctgcctaaatcccccatgagccctgggcgcagccccaggccgccctgtctgcaggagtttgggggcagacctcctcttctccagcctgcattccccggaggctccatccacccatctgtagtgacttgtgatgtgctttataccggagttatttgcactgtgagcttcttgaggtcaagaacaagttccgatccagaggctagcacattgctgtgcctgtgaggggtgagcagtaaatgtctatggaatcagtggatcgccaccctacgccgccaccctatgccgccacccccatatctggtactcaggcgatcctggccctctggcaccagtgccaggagtgggactcaccaccagggattcattgaattcgtggttcaggtcggcctcctcggcagcttccaccagattctgagggatgggaacacagaggtagggagaatgggtaaaaggagcccagtgggttttcagcaagtgaaacagttgccgggtgacccagcaatcccactcctgggtgtatgcccagaaggattgaaaacagggatgcaaacaagaacttaggaacgaatattcacagccacactatgcacaacagacaaaaggcacacacatatggctaagtgaaagcagcccatcggcagaggccatgcacctgtgatcccaacaacatggcattctggaaaaggcaagactagggagatagagaagataagtggttgccagtggttggggatttttagggcagtgaaattcttttgtctgatactgtaatagtggatgcatgtcattgcacatgtttgcaaacccacagaatgtacgagaatgaaccctaatgtgtgctatggacttggggataatggagattcattgattatacccaatctaccatggatgcaggatgttgatagcggggaaggctgtggcaacaggggatgtatggaaactgtactttcttctacattttgctgtgaacctaaaatggctcttaaaaataaagtctactaaaatatgcgtgcgtgccaaagccaaaaggtggaaacaactcaaatatctgtcatttgataaaccaataaacaaaatgtgggctatgcacacaatggaatattatgcagccctaaaaaggaatgaagtgctgatgcatggaacaacacagatgaaccctgtagatattatgctaagtgaaataagtcaggtacaaatggtcacgtattgtatgattccatttatgtgaaatacccacaacatgcaaatccatagagagaaagcagaatagtggttgcagagctaagaggaaggggataggggagtgattgcttacttagtaaccggattctgtttggggcgatgaaaaagttttggaactagatgatggagatggttgtacaacattgtggatgtacttaatgccactaaattatacactttaaatggtcaactttatgtcacctgtattttaccgcaatacaattttttttttttttttttttgagatggagtctcactctgtcacccaggctggagtgtggtggtgcaatctcggctcactgcaaccccctcctcccaggttcaagcgattctcctgcctcagactcccgagtagctgggactacaggcacccaccaccatacccagctaatttttgtatttttagtagagacagggtttcacgtgttggccaggatggtcttgatctcttgacctcgtgatctgccggccttggcttcccaaagtgccttccacgtgagccaccgtgcctggcacaatttttttttctttttttctaaagagcaggccagcatcgcagagtgtcaggggaagtcagggtgggggaagtgctttgggagtcagaggacccaagatcctattctggctttgtcagggccaagccactaagcctctctggtcctctgcttgcacaactataaattgggtaggataattcctgcctccccactctcagcctacagatcctaggataaggaaatcccacaggggaaagctcatttcagggaggctttgcaggaaacttcccacgcgcaccctcatggaaggtctgaggcccccatacaccacccgcaggaggcgcagggaccggtcctcagagaaagtctgcagagcagcacttctttggtctctgaggctgtggaagggcacagggagcctggagccccagcctctgggggtgtctcaggactgctcgctgctctagtgacacaaggaccgacgcctgaagtcaggcgagtctcataccccactgtctgtgtttgatccaaggaggctgtttacacaacgctcactgattgaaagaggcaggtgttactgcgggtgccaggctgtgtgtgaggctagtgctttcctgctgtggtgtgtgattcagggacccaggataggctcttgagtccccaggcatcttctcattggttcctgatgctaagatcccttgccctgcagaaatgctgcacattataacaagtgggaaagaaggccccagcaaccctgaccccggcctcctcccagagtgggggttgtgatgggggtgggggtacactgacagtacactggagaggccgcagctcgcctgccctatctgccccttcccctgctgcttggccctggcctcagcctcccaatccagccaaccactcccgatctcctctctccttgttctcctggctggtcttacgagtcctttcagggagagcactggtcttggatggtccgattcttggctggatggagtggaggactgtgtctctccaaccacactgtatctactggtttataccatccaggtccccataggcctcagtgcagacacttcaccccagagaaggggaaagcttctgtttctcctgggccccaccaggcttggtggatgtccagtaacagagtcacctgggcacaaggcccatccctgtaagcacctctgctgcccgggtggccctcagagcacttggaagccatgaaggtgggtcctgatggctgaatgagggtgagggaggaatgaggacagatgagaaggaggagaggggaggggggagcttggctttgctggctccagctagctcgactcccaccctccttctgctcctctgtccatccattcccaaagcaattcctaggtgctcaccccgtgcagtgctctgtactggtcactgggtatggcctggtgactcagagttcctcacaatgctgcaggctgacccggcagtgctgggcatggccgcctcggggcagagctctgatcccagcccctcccctctcctcttgcttcctgtcatttcctctttcacagggattcttggagtgagggttcttttggctaacgaaggtacaaggcggaatcttgtaagataggagagggtcacgaggggggaggatgcagggccatgacatcgggagggtcactctgccacctgcgtcatggggctggggagaaacgccctgcagatcacaggcctggagtacctggaccgcctcgactttcctccgcagcatgttctccatgtcctctgagaacttcctcaccagctccaagccatccacctcctcgatcttcagactggactccacatccttgtacttctgtttggggaaagtgggagagatgcgtgcatgtggttttgtaccaggatagttgcacctgtgtatgcatggcctccaacctctccacagatgcattccggcacatggagcctggtttactcaactagggtgaggcccagccctctcctccctggacaacatccccagtgatagaatagctgcctctcctcaaatatcctctctgttccaggtgctctagacgcattgcagttatagccttaacaggggagtagaccgaggctcagagaagtcagtgaacttgaccaaggtcaacagccaggtgagcaggtgacccctgatggggccaggtctctcaggcatccccagccatgtcctttgtgcagagccacgctgcatcccagggcttgtgaaaccacccctggcatcagttcacctttcctcaatgtcccagaagaggcatcttgctatgaaagtgcccccgtgcacatggatgtgaacctcagttcccactgtcccagcagagctcagcagctccaggcactgaggatggctgcctgacaattgccagtgagcccaggaaagcctggaatggggtttgggttttctctctgggcccaggggagaccagctctcactgactgtgtattgtgaatgtctattcacccagctctgcaatgtattggccgtgtgaccacaggcaagccagtcaatcactttcctcatctgtaagatgtgacatttacatagctttagtgaatgttctagaatgcacagattttacagaatgtttttaccccaaacggccacatccgtactgctctatgctcctctccccgggctgtggtgctctgaagcataggagcgtgctgtgaggggcaggcggggcctcagctgtcatcgctacagtggcctgtgggggcccggggagccgcccaccctggctcctcttacttccaccagggacaggcctgggggctgtgggcagggcagttgagcagggacatgtggtcacatgcaggcataagagcctgggattcaggatctttgtgatatggaaaaggtgcctcatgaattggtggtgggaatgaaatcatgacaatgaagctcttagtgagtggcaatgatagagaagggtgagctgccattggaactgctctggggagttacaaatattagagaacagtgaagttgtttataacctggtaagaagaccagccagccataaatcggcacagaaagcaatgcatattaagggggcggatgctggacatggctcgggggctgacagctggaggtatgggaggtctccctgcgcagaggccacagccctttcaccttctacggcccgagcagcttccagggccctgcacgtgccctccaagtctccgctggcatcacaggtgttaggcctgcatcccactgcatccactccctccgtctctcctttattcttcaccccacctccacccagtacatctgcaggtctaattccaccttggcctctgctccctgaggacctgacacaatgctcttgaccacgcccccgaaccacccccactgccctgctttgggagttgagaaaatcattcacctccctgggcctcagtggccccatctgaaataaaccgatttgatgggatgcccaaggcccctcacagcaccggcatttgggggcttcgatggctgactgccctctgccacccggtgggctctctggaagggggtgactgaccttctgcagcaagagagagcctgagtatttggtcacagtgttatacaggtccccgccgaaggtgtcagcccatagcttcactctgccaggcaatgaaaggacacgcgtatacacacacgtacacgcacaaatacagaaacacacgcgtagacatatgggttcacacacatagaaagccagtgtctacacacagacacctgctgatgcatgcatactccaacacacagacacataatgcataagaaatgcacacacacgtacacacacatacataccccccacacacatgcatatgcatacacacacgtgacatatgcccagaaacacacaaaagagcacctgtccctcctccttgtccctaaagctacagccatggcctgggcaggagacgcggagaaccctcaggacccagcggctgcactgctgtgtgctgaatgtcctcggcaggttctcctgctgagggttgtggggccgggctgacgagcccaggactgagcttgaccccaagcttccagggcctctggttggagagtggcagactgagaggagagaaggaggggagaggcagtggacagcctcaggccagggccggaggaccctgaggacaaaggacaacctgcctggccacagctgtggcctctcaataaatcgttccctccagtgcactccactcaaagccactgggggctgccgaaccctctgttgaaacctcagagaacgcgtgaggcaagggcacagcaggaaaaggctctgagctgccactgctgagcctgagggcagggcaggccaggagggcataaggaggccacacctcaccctctgtgtaggcagcctagtggggagccccgacctctcgcccatgccccagaaatgcaccacaatcccaccatcttggccaggctggtggggtcctgggggcaggtacacagggctggggctgagcctctccagatggagcggaagtggtttgcctgtgcgatcctttcaagatcagcagtcatcactcaaccaatgtttatcaaggtcctaccatgtggcagcctggagccaccccacagtccccacccttgcagggacagctttgtcatgcgggtagcatagtacatgtttgaaggtgcccatgaaggttggggaggggtagtggtataagggaaggcttccctggggagggagatctgagctccaggttagaagtttggtagaggttagcctgcaaaggggtctgggagaggattctaggtcgggagtacagaagagcttggaggagtaaaacgtgacttccgggcttccagtgtgggttgttgacctgatggtgttgttactgaatacaattaagactatcaggaagggcagggggaatgagctgaggagggtgaaaagtgatgtgtgtaccttgggctctgctgaatgtgaggttcccgttgtagagctaccaagtaccattgggaaggttgtgcactgcacaactctagaaggcaccaattgtgttttaccttgaaagacacaaatctgaatttaaaacctcacatgatgtttaggaaaagctgcccataagcactgggtatgtgtctagtaggtagagacagggctgggagtcattgatgcaaaggtagggattgaaattctgagggcaggagggctctctcaaggagagtgtgcagcgtgagatctctgagcgtcgacagctgctggggagcaccccccacctccggggcaggcagaggaggaggagcacttgaggacagcagagataagccgtgcccatgcaggcccagcggagcgcagtgccacggaagtcaaggactgggataaaagaagacgggggcttgtgtgtcccaagcaacagggtctggggtgacaaggccaggaatgtctcctggattgggcatgaggagggctttgggaaccctgtggaaacagacttgggaggaggtggaagcccggctggagggaaagactgagaagagaggttcggcgggagtgaggacaggtggggccaagtcctgggcaggcagatgaggctgtgtgcaggctgttgtctctggcagcacccagggcttctgcatagatggccgctggggcccccctccctgaaggcctggattccagccaccccgacttggccctcagcccactcctggagttggccctctcctatcagctggtgtgtgttctggggatgaaaattgttctgaacatctcctgcagcaacagatagcgttacgggctggcggcgggtgtaatggtgaaagtgcagtccaggctgacaggagttcaaatcccagcaccttcacttcctggccttgtgaacttggggaagtcacctgacctctcggggcctctgtttcctcagctgcaaaatagggataaaaataagcccccactgaatggctctgcaaactaacggtgtcatttgtgaagcgcccagctccgtgccaggcagggaacaaggagagctatgcggctcgatgggaaacgatgctgcctaatccactggtcagcaaaggctaagcacaggcacggtgtgtcatttaggctccctgtccccactcctgctaagacatgcagttggcaggtggctctgttggtggcctggctatggtgctgggctcaagcggctggagtaaacaggatggggtctgtagcacctacagtctagaaggctctgctacccacatgtattggaaatttccttcctaggaccacctgagctagggcctaaaacacagacaccccagagaggttgcacagtaatttacatgtacaccaaggtgcacatgactgataccgggttctttcctggagccggtcttaatggccggctagagaatcaaggttggaaggaggcagaaaggtgtagaaagggaagactgcggccaccaaaatccatttttttccccagttcctggacaagccacctcctgtgcgcatgagacgttctgtgggttcagaactgcttcccctttttggaatgtcaaaatacgcatttcctgccaaatgcttcggggagctgcgatgctgagataacccggctcctccaggctgcctcatctcagcgattatcctgaaggagcacccgcccttcaggtgtcccagaagctgcttgtcaggccaggaagacagcagccctgatgatcagttcttcctaaagccatccggctcctggggagaggcaggtgggactccagaactcacagagcttttgggaggagaaagaggaggccggagaagcaaagggctttacagcaagagagtggtcagtcgcagccactggggaaaagcccagagggagggcaggggcgggaggagtgggcagaggatggaggcccagcccgggaagaaagtgggaaagggtgaccgggtttttggggtggggttgaacgtgatgcttacgtttccagaggaatcttggcctgtccccacgcaggggacagggaggtgcctagaagcagcagccacaggagggccgaggtcttctgcacaaaggcccaggccacgggcattggctggaggggaatccagcggctgctggagctggggtttgcgaggaagttgggagttgcaggcatggtgggcctggggttggggaggggaaggagggcagagcagccacagaccatgagctctgtctgccttcctcccagaccccaggacgccccaggcctttgtcttccgtgccttggcgagcctggggtctccagcctctcagtcctgggtggggagggcttctctctgccccacagctgcagctcacagaagagtcgccccacctagcaagcaggcctcggagacagggactgggggagaggctgtggcaacatgaaaccctttaatccgctggcctctcctctaatcctctcctgacagcagggagggggtggcagggggtggggagctgcctcccaagattaccacaactgcagctggttccctcagggctatagtgcacccctctgctttaaagaggcagccccgttcctgtggaaccaccttctggacccaggaagggcttgctgtgactatggccagaggacagcagctgagtttgcacagtactctgattgacccacaaatctcttgttgaccctgaggtgggggtgtgtcctcatccctgcttggcagaggctcttgaggcccggggagtcccaggggcagagctgggactctggctggtgtttccaggcctggtgcctttgggacaggtcataggtcataggtgaagtcagtggacccacgcctccacatctcagctgctcgtgggcggggctggggacgcatttgctgtgcaactgatgaagcttcaggacccctgaatccacagactcccccctttcccggagaggccctagcaatgtgttcctgtggccaaatgtttttgtaaaatatgcaaaagttgagatagtttaaccataaccggttgagactgtctgtctctttccatcccaacttctcttccgtctgagggactcttagttggatgatgtttgggtggctgagggcacttgggggatccagttaagaggaaagtgagctggggaaacacttaatctgggcttagtgggatatgctgacatggttcacagtgacttctttgtacagagaagttacctccagctgagtgtaggcagggcttccaggaacactcatcccacaggacatcccaccagcagatgcagcaagagaggctgggccgtgatgtgagcgcacgctgtcacacccaccctggccatgtgtggtggggagggcaaagtaacagtcaggagctcatctgcagaaaatctacaaaaagccacacaggtaacatcgttggtggaggatttggttctcaccaaggcctggccaggacagaagttctctcctgttaggaaaatagtggatattgaaagaatataattacaccgtacattgctttgtgttctgatgagagttacacaaattagaattgatcaaaattcttgtgttgtgagcccaaaccagtagtagtaccacatgggttctccgggggtgaagtcatagattttatgcagtccccgtatcagattattttcttagtgtaactggtgcactgtgtcttcacaaaatctggtggttccagcaaaatggtaagcaaaattgccaccaacgcagagaaatgcttgcagaagcaagtgttctgatgacaaaactcctacacagattcatcaataagtcagtgctgtagtatcagagtaatctggtggcacagttttgtggctgaatacaatgtattttttaaaggcatctaaatgattcctatgaatgccttaatttcacataaattttgtacatgttttgaggattacaaatcaaacacatttagaaaaaatactaca
